United States Patent Application Publication US 2020/0377945 A1 - sequence listing, part 42

SEQ ID NO: 8244 - DNA, 25820 bp, Unknown
  gut microbiota DNA sequence
aaaaatcccatttttctcaggttcgaattgccttttgtatcccgggttcgattccttttttttatcccgatgggaaataccgaatttttaaatttctttcactttttcgacttcatccggtcatgtgtgcaaaattactttttcacaccggagattggaattgtcaaacagctgaaaaacaatgaagtatggtgcgtatttatggctttttcaaaagccttaaaaaaagccactgaattggcgaaatccaacttcacaaatatgtagcggaatgcgtagtgagggtaaaaaaagaacccttgaactatctctaattcaagggttttcatgtgtgaaaagcatttatgtactttctttggtggtgccaccaggaatcgaaccggggacacaaggattttcagtcctttgctctaccaactgagctatggcaccttgtggttgttcggtccggtaatatctcttttgcggttgcaaaggtagtgaaacttttggattctgcaagtcttctggaaataaaaaacactgataaaaagctagtcggcttattatcagtgctgtatagaataaaaaatatttcaagtatataatgaaatctattgtttatcttccttcaatggattccatccttgtgctttcaattcaaattcttggccgtcacgcgtaatcaatgcacagccaagttcgggtttggtgatatgtccgatgaggcgcactccttccatttgtgatactttctcatgatcggcgatagaaacggtaaagagtagttcataatcttctccgccattcaaggcgcaagtcgtcagattcatgttaaactcttcagccataacagccgtctggtaatcgattggaatatgttcttcgtacacgcggcaaccgacattgctttgtttgcagatatgcatcaattctgatgacagaccgtcagatatgtccatcatagaggttggaacaatattggcggcagctagtttctcaatgatatccttacgtgcttccggttttaactggcgttctaacaagtattctttgccggtgaaatccggttgaatgtctttatcaccttttagtacaactttctcacgttccaatagttgtaaacccatataagctgctcccagatcaccgctgacgcagaccaggtcggtttcttttgctccattacggtaaaccactttgtccttatcagcatcgccgatacaagtgatgctgatagcaagccctgtaagggaggaagttgtatcacctcccacaatgtcgacgttatattgctggcaagccagacgaataccggaataaagctcgtccatatcctctacgctgaaacgcttggaaaggccaagagataccgtaatctgccggggagtgccgttcatggcataaatatcggagaaattaacgactgctgatttatatcccaaatgtttcaagggaacataagtcagatcaaaatgtacaccttccataagcaggtcggttgttaccaatacttgcttttctgaagggtaggagagaacggcggcatcgtcgcccactccatatttactggattcattttctagtttgattccctcggtgaggcggtcgatcagaccaaactcaccgagagatgctatttcagttctcataaatcggggtgattgtttaggcacggttgataagttcgcgcatgattgttgtcattttcggttgagcggcgtcggctgctttctgaacttcttcgtgcgttacttctacgatttttccttctactcccaagtcggtaatgacggaaataccaaatactttgatgccacaatggttggctacaattacttccggaacggtagacataccaacagcgtcggcgccaaggatatggaatagtttatattcggcaggagtttcgaaggtaggaccttgtgtgccaatatatattccgtgctgtactttgattcctttttctttggcaatctcatcagctttacgaatcagttccttgctgtatgcttcactcatgtccgggaaacgagggccgtatgggatattttttccacgaagcggatgttcggggaaatagttgatatggtcggtgataatcatcaaatcaccgatttcgaagtctgcatttgtcccgccactggcgttggacacaaacaaggtcttgattcctaattcgcgcatcacacgtacagggaacgtcacttctttcatcgaataaccctcgtaatagtggaagcgtccttgcatagccatgatatccttattgcctagtttgccgaaaatcagcttaccgctatgaccttcgacggtagataccgggaagttcgggatgtccgaatactttatttcatacttctcggtgatttcgtttgccaaactgccaagtccggtgccaagtataatggctgtttccgggctggtatgcatcttacctttcagataagctgcggtttcttgtattttctctaacatagtcaataatatgttggttaaatttatcttgttgattctgtaatatttctatttcaataggcaaggcatagataaatggtttcaattccttatccaaagccggatggttaatcaggcgtgttgcatctttttcggtagtaataatcaaccggcgttctcctttcagcctatgaaaccgttctttgataagctggatatcccgatggctgaaattgtgatgatcgtcaaacgataataaatctatttgttgggtacaatctttcagcctttcaagaatgggagccggtgaggcaattccggtcatcaataatatatctgtatttgtcagtgaggacaaagcaatttcattgtttgccgaaggggtatctgtgtccggaaccatcataggaaacacaggttgcaggttgccataccggaacgatgaaaagaataactgttgatatggataaaggttcagtcgtttcgtgatgatattataatcaataggcttgatgtcctgcggacatttggtgacaataacgatttgtgcccggtttttgccgttaattggctcacgaagtcgtcctgcggggagcaaagtgtcgtcacaaaacagccggtgataatccgttaacagaatactcaatcccggtttgacatatcggtgctggaaagcgtcatccaacaggataacatctattgaaggcttttgcagggcaagcagcttttctatgccatgacaacgcttttcgtcgacagctactgtgacagacgggaatttttgatgcatctggtacggttcgtcgccaatgcttcttgccgtactttccggagtagccagcacataacctttcgtatgccgtttgtacccccgacttaatacagctacattatattgattacaaagagactttatcagatattcagtgtgcggagttttccctgttcctccaacagcgagattgcctacgctgatgataggtatatcaaaactctttgattgcagcacttcccagtcaaagagtttatttctcatcattaccgctgctccgtagagccaggaggcaggatagagccacttatgtatcttgataaagtgttcgtccatgtatggcagttatttaatattcagttcgaacggaatacgagcctgaatcatggattgttcttgcagatttttcagtaaaccgaattgttggtagaattcacctaacttacttttcaacaattgtgattctacgtaattcgtcggtttcgtatcaagcagggaagaaaagaaatcttgttttgcaggataagaaacaatggtgtagccctcgataccggcttttgccacggcaatatccaatgccttgtcaatgccgcctaactcgtctactagtcctaactttttagctgtttctccggtccatacacggccttcggcaatcttttcgatcgcttcctttgtcatgtggcgtccttcagcacaacggctgacaaaggtgtcgtatccttcggtaatcatcatttgaagcaaggatctttcatcctcgttgaacgggcgcatgatattcccgaaatcagcatatttattcgtcttaactacatcataacttaaaccgattttatcagtcaatccttttacattgggaatgataccgaatattccgatagacccagtcagggtagtaggctctgcaacaatcgtgtcggcaacgcaagatatatagtaacctcctgacgcggcataatcccccatagagacaatgaccggtttctttgttttcaactctttcactgcatgccagatttgttctgaagcaaaagcacttccgcccggagaattgacacgaagtacaacagctttcacatcattgtcatctttcaatttacgcaggtcacgaatgactttcgaaccaacaattccgtcctcggaagttgcggagctcggatagtctgtaatttcaccggatgcataataaacagctacgatattgccgcttttgtctttgggtacattcttctttacgttcatcatgtcgcttaatcctaccatcgggagattgtcatcctcatctatctctaccagttttttaagataattgcgcacatcattgcgataaatcaaagtatcagccaacccgcaccttacactttcttctgatggatagaacattaacatacgatcggcataaacattcagagaatctactggaatattgcgggaagcagaaacctcctccgtcacctggccccagatggaagtgataaatgctgtcacttgttcgcgattggcagggctcatctctgttgcaataaacggttccacggcagatttgtaagttcccaccttgaacacttgcatctcaactcctattttttgtagcaggtccttgtagaacaggggagcggaagcgatccctctccattcaatcattcctttgggattgagcagcatcttatcagctgcactggaaagataataaagtccctgcgtataggagtcggcataagctatgacgaactttccactctccttgaaatcgagcaatgcgttacggatttcttgtaaggaggcataggaggtacctaatgaacttgcttgcaaataaatccctttgatattttcgttttctttagccttctggatggaagagagaatatcgtccagtccgtacgtgttagattcgtcaccaaacaactgtgataaaatacctagcggatcttcttgcgtacgttcaaccaacgttccgtttaagtcgagcatcattacggaattcttttttacgattgtttccgtatccgaagcggacatgatgccaaacagcgttaccatgctgattataaataatacaatacttgacaaaatgatacctgtcaccgtggcaagtgtaaatttcaagaaatctttcattatacttattgtttttgcgtcagcttgttattaagctaacaaagataaataattgagttgatatttattcaataagtcgtacgaatttttgttttatcacagcgaatcgatataaatagaagcttctttcctgcaagatttaagtatatttgtctgtatctaatccttttaaatgagaagaattctctaattttgtggcacaactattatcgtgaaaaattaaataaatatcagcatatgtaatgcgacattaacttaacaatctatttaccatgaaaagaaaaaccccttttgtggctgcagctttagcagcaggcttgttcttctattcttcctgtactccgactgaaaaagcggaaacaaaggattatactcaatacgttaatacctttatcggtgctgctgataatggtcatacatttccaggcgcgtgttatcctttcggtatgatccagaccagtcctgtgacgggagcagttggttggcgctattgttctgaatatgtttatgaggattccctgatttggggatttactcaaacacatctgaatggaacgggatgtatggatttaggtgatattttggtgatgccggtcactggcacacgtgcccgtgcgtgggatgcttatcgtagtcattttcctaaagataaagaagcggctactccgggatattacaccgcagagctctctgatccacaggtaaaagcagaactgactgcctctatccatgctgcccttcaccgctatacttatcacaaggctgattctgcctctatattgattgacttgcaacatggtcctgcatggagagaagaacaatatcattcacaagtcaacagttgtgaagtgaactgggaagatgctcaaacactgacaggacatgtcaataacacggtatgggtcaaccaggattatttctttgtgatgaaattcaaccgtccggtagtcgattcactttatcttccgatgggcgaaacagaaaaaggaaaacgcatcattgcctcttttgatatgcagccgggagacgaactgatgatgaaagtggctctttccaccaccagcatagacggggctaaaaagaatctggaagcagaaattcctgcctgggattttgaaggagtaagagctaccgcccacaatgaatggaataactatttgagccgtattgaaatagagggtaccgatgatgaaaagacaaatttctatacttgtttctaccacgcattgattcagcctaatcaaatttcggacgtagacggtatgtatcgtaatgccgccgactctattgtaaaagccggaactggaaccttctattctacattctctttgtgggatacttaccgtgctgctcatccgttttatacattggtgattcccgagcgtgtggacggttttgtgaattctctcatcgaacagggtgaagtgcaaggcttcctgcctatttggggattgtggggaaaagagaatttctgtatgattggtaatcacggcgtatcagtcattgccgaggcttatcgcaaaggattccgtggctttgacgctgaacgtgctttcaatataataaagaagacgcagactgtatctcatccgttgaagtctgattgggaggtttatacgaaatatggttatttcccgacagacctgataaaagcagaatctgtatcttccactttagaatctgtatatgatgattatgctgctgccgatatggcacgtcgtatgggtaaagaggaagatgccgcttattttgcgaaacgtgctgactattataagaatcttttcgatccggagacgaagttcatgcgtccgcgcaaagctgacggaacttggaaagctccgtttaacccaagtgcgttggcacattctgaaagtgtcggtggagattatacggaaggaaatgcatggcaatatacttggcatgtacaacatgatgttccaggattaatccagttgtttgggggagaaaaacctttcttgaataaattagactcattgtttacggttaagctagaaggtgaaagtttggcagatgttactggattaatcgggcaatatgctcatggaaatgagccaagccatcatgtgacttatttgtatgcactggctggtcgtccggaacgtacacaggaattggttcgtgaaatatttgatactcaatacaaaaacaaacccgacggactttgtggaaatgatgattgcggacagatgtctgcctggtatatgcttagtgcgatgggattctatccggtagatccggtaagtgcggaatatgtattcggtgctccacagttgccgaagatgactttgcatctggccgatggcaagactttcacgattattgcggagaatttgtcgaaagaacataaatatgtagatagtattacattgaatggcgaaccatatacgaagaaaacaatctcgcatgaggatattgtaaaaggaggaacgctggtatacaagatgaagtaataaattcgtttctgtactgttatgggactaatgactttaattaatagtggttgggattataacttatagtagagaagaaaaaaagatactgcaagaataaattgtatgacacccgggtctcatgatgcttgacacccgggtgtcagcatgttcaacacccgggtgtcggtgtgcatgagacccgggtgtcgtacaacttaatactaccaaatgaaattaatttgaagccatacgattaagtttgtactaatacaaacttatttccctacaatcctactcacctctatacgctgcttttcaaacttctcattattggtgttgcggttactaacctctttacagcgaataggtgcactcatttcaagcaagcgcaaaatctcatttaaagattcaccttcaaaagtcgctttataggaatactttcctaattcggcatctttcagaataaattccacgttataagtctgtcccaaacgtttgaatacatattccagcgggtcatctctaaaaatgagtattccatctttccatgagcaccatttataagtgttggtcttattgacgttatataaagaagtggctagattatagtcaattttctctcccggtgaaagggaaatcgtctttttctggtcaagagtaactgcgacctttccttttactaacgtcactgctgttacatgatccggagcgtatgcgttcacattgaatgcagtgccggtagcttctacagtcagttgttttgtttttacgatgaaggggtgctctttatcggattctacttcaaaataggcttcaccctgcatcgaaacaactctttgcttatcattgaattgagtcggatactttaaagaacttccggcatttagccaaaccttagaaccgtcaggcagattaactaccgaccaagtgccataaggagtgaataactcctgataagtctctgcaatttgagaagcgggtttaaaataaagataagcagataatatcagtaaaggaagaagtaagatagctgccacttgctgccaatagtgtaggaaggacaatttaggacgaacggaaaccggctggttttgatggagaatctgctccattacttttctgtgcgcactgtccacatctatctcttccggattaaaagccgggtgactgacttcccacacattcttttgtgatagaaagctcctatagttttcgggagtagccgatatccaatcatccagtacctttatttcttctggtgtagcctctttcgagagatatctggagattataatttctatgtctgaatctttatttatcatatgcattttaccttatatataatagacgtttcagaaagaaaatcccacattcattagtggaaaagaaataaaaaaagtagtaaataaaaatcttttaataagatgcggagctgcttcaatgctttgctgatacgtacttctaccgttctgacagagatattcaggcgattggctatttcctgatatttaatattttctaatcggctcatctcgaacacttctctttcttgaggaggtaattgttccaatgcatttttaagttgccggcataaatcagaatacagtatgtagttttctgtcgtatctatatctatagaatccgatttaagttcgtaagcaatgtgttcatctataatcctgcgatggcgtaattcgtccagacagtaattcctgaccgctttcagtaaatatgattttagtgagttctcaattaccaatgatttccggtcattccatagtttgagaaagatattttgcacaatatcttcacaggtcgatttctccggaatataagtaccgccaaacaacaccaaatctttataataagcatggaataatcgggtaaaagcctgtttatcatcctgtttcagtgctattaccagaaaacggtcgtcggaagtctgttgttggatattcggcatagtattgtagtaaaggttctattgtcgggggtaaaaatagaaagattatttgggataaacgatagtttgaagaaaaaataatgcagatgaaaaaataatgcgatatccaatgtggcttttatttttagaaacgtcttattgatagaaacgagagaaaaacacatttattaacctttaaataatacaagccatgagaaagacataatcagtgaattcagcttccgacaactgataaaaaaaggaaggtctgactcaccttcctttccaaagattcagttattcgttaatcaacttatttgtagaaccaataaccaaacatgtaaaggtatgaaacttatttcaattagaaaaatgaaaaagagaattaatgtacctgcgaatgtaaaaatggggagaatctgtgctatatggttgttttgtatcgctttgcaagctatcagtatacctatcctggcacaatccgccaaaattacattgcgactgaaaaatgtgactgtagaggaggtcttgactagtatcgaaaatcagacagaatatcgtttcttatacaacaaagacattgttgatgtaagtcgtatagtaagcattactgtgaaaaatgaacggatgactctggtactggataaactttttaaaggcgaaggagtatcttatacgattgaaaaacgtcagattgtattaaacaaagtttcatctcaaccacaggataacaaacagccggtcaaagtgaccggaaaggtagtggacgaatccggagaggttcttccgggagtgactgtgatgatagaaggggctactcaaggaaccataaccggtatagatggcaattaccagttgcaagttccggaaggctcgacactgaaatttacttcaataggttacactacatatacgcagaaaattacccgaccgatgacgttgaatgtgacgatgaaagaagattcgaaacagttggatgaagttgttgtggtagggtatggaacgaccacccgtaagaatctgacaacttccattgcaacggtaaaaacggaaaaaatatcgcgagccgcaacaagtaatatgtcacagatgttgcttgggcgggctgccggactggaagctacgttgacaagcccgcaaccgggtggagcagttgacctttcaattcgtggggcaggtactcctatctttatagtggatggcgtaatgatgccttccacttctttagaggttggaaacggaaaccaggttatgcccaactctatcaatcgttcgggattggccggacttaatcctgctgatattgaatctatcgaagtgttaaaggatgcatctgcctccatttatggaattggtgcagctaatggtgtcgttttaatcactacaaagaaaggtactgaaactcgtccccaaatcacttatgaaggaaattattctatcgtgaaaaactatccgtatctggaacctttgagtggggaagaatatatgaatgttgccaacattttcaataaagaaaactatttatttacgaacggtatgtatccttacggtgataaaccttttgataataaatgggtacctcaattctcacctcaacagatagctgccgctcaaacaacagactggctggattgtgtattaaaggatggtagcatcaataatcataatatcacaattacgggtggttctaaactgctgaaatattatctgtccggaaattattacaaacaggaaggtacggtagaaaactccgctatggaacgttatgctcttcggacaaacatatcttcacaattgcttccatttcttaagttgacagcaattgtcaatgtaaatgaaaatgaatatacaaattcaacttccggtggcggaggtggtggaaatgggtacgatgccatacaatcagcattgacttatccttcttatttaccgatcagaggtgaggacggaaaacctaccttatattcaaattaccctaacccggccgaaatgataaaagttagtgaccggactaaaacaagcggttattatctaaactttgctgccgatgtggatataatcaaggatatgttgtccttccgtttgatgtatggcattaataaggagaatgctaatcgtaatctatatattccttctgatatatattttatggacatgtataaatcaagagggcatttgggatatgttgaacgtagaaaccaaactatggaaggcacgttgactttcaaaaagcagtttggagatttgttacgtgtcgatgccgtagtcggtatgggaaggtatacgaacgattcaaatggtcttgaacttgactacgaacagattaacgatcacattgctgctgataaagtggaagctgcggaaggcgctttctacccgacttctttcagggcagccgacgaacgtcgttctcaatttgccagggcaagtgtggatgtactcgacagatatgtggttgccgctactattcgtcgcgatggaacggataagtttttcccgggaaagaaatatgcctatttcccttcagtatcattggcttggaaattatctaacgagccgtttatgaagcatatatcatggattgaccagttgaagattcgtggtagttatggacagacaggtaatgataatctgggtagttcgctttatggcactttcagtctggcagcccaatatatcaagttctctaacaattcagtgacttatgtgccctatctgcttagcggtcctgattacccgaatgttacctgggaaaagactaccatgaaaaatataggtatagacttttcagtcctgaaagatagaatctgggggagttttgatatgttccgcaatgatgtaaccaacttgctgggatatgactctgcctctccgcttagtatgacatcttccgtcccgatgaattatggacattatgtacgttacggatgggatgcgactatcaactcactaaactttgaaatcccccgtgtgtttaagtggacctcacaattgaccttatcacatcataatgccgtttggaaagaacggatgcccaactattattatgaagaatatcgaatccgcaagaacgaaccggtgaatgcttattattactatgaaacggaaggcgttatcaacatagataaaagcaatatgcccgaatcgcagaaatctttgccggcagatgcgcaacagcccggttatccgattattaaggatgcaaatggggataacaaaataacgattgatgatgtaaagatgcggaatacacttccaaaaattcacataggctttggaaatacatttgtatacaaagattttgatctggatgtatttatgtatggacaattcggacgtacacgctataactatgcatatcgttgggcacttgtcggagatgtatattacacgagtcccaagaattcaaacaaatatgtctatactatctggaattcccaaaccaatcagaatggaaaccggcgtggtattgcttcaacaaaggctgtcgctttgcctggtaacgtaggctttgaggaagattatcagaatgcttcgttcgtacgtgtcaggaatatcactttaggatataacctttcaggaaagaagctgggaagagtgggtgattatgtgagttctatcagagtttttgtcgactgtcagaatccgtttacttttaccaagtttgtaggtgtcgatcctgaaataaagacgggtggcgacggctccaaagcggagtatccgatgacgagaacatactccttcggagcaaaaatatgtttctaagaaaacctgtaacgaaagaaaagattgaaaatatgaacaagaataaattatttaaggtgtttgtcatgattgcatttatcatgtgcagttgtgaggataattttgatccgaagatgtatggcacgttgaatgtttctaattatccggtgactgaagccgaatacgaatcatttatgatgacctgctatatgccttttacgacaacatggacctattggattggtgccggaacaagtggcaatcagcacggttggtatatccctgccggaggtgtactgaagttctttgattatccgacagatgaggtggctgtgtggaataatggttggggaggcggatattatttcctttctaaagccgatttcagtcagtgtgtttattacgcaagcggtacattaagcgatgaaaacccgaaccactttccgaaagtaagtgagatttcctacttcaccaatgtgatcggcacactggagaaggcttctaccgaagtggtctccgaagagcgtaaaagagaatttattgctgaagcccgtctttgtcgtggattgatgatgtattatttattgcatgtatatggtcctgttcctttgattgtcgatccgaacgacctgattaatccttcaaaactggaaaatctggtacgtccgacattgcagcaaatgacggagtggattatggctgactttgagtatgcttatcagtatattgcagatacgcagccggaacagggacgttacaataaagactatgcacgtgtatgcatcatgcggcattgcctgaatgaaggctattatatgtccggttattatcagaaagcgattgatatgtataacgagttgaagggacgatatagtcttttcaagaaaggggacaatccttatatcgagcaatttaaaaatgccaataactttaattcggaagtgattatggctgtcagttgtgatgaaacggcggatggtacgaataagtccggcaactttaacccgctgatgatgcttgctactcccgataatgcagcccgagtggacgatcagggaaatccgactcctttctatctgcaaggacagggatgggggcaaactttcaatgtgtctccgaaattttgggatacgtatgatccttcggacaaacgtcgtgaagtgatcctgaccaaatattatacgactgcaggaacctggattgaccggaatactactacatgggacgggtttatcattaataaattcccggtggaaacagctacggcttttcaggggactgatataccgttagcccgttgggcagatgtattgcttatgtatgcggaagccgaagtacgtaaaaacaatgcagctccgtccgctgacgctatagccgcggtcaatgaggtgcgtaagcgtgccggactgggggatcttccgtcatcggcaacagcgaatgttgaagctttcctggatgctttacttacggaaagaggacatgaaatgttgtatgaagggatgcgtaaaatagatctcatccgttttaatcagtatgcgcagcgtacagcgaagatcaaaggagtggctcctacacatcaatatgtgcctattcctaattatgcggttcaacaagcttcggaatcttatggaaaagtgttggtacagacatttgaacgtgagggatggaaagcggatcttgcggcagctcgcaattaatgtcatcattcattattgttaaactagagatcttaagaaaaatgaaaaagatatatgtattattcatgtcgtcgttattgctcctttcgtgtgcaaaagatgatgttagtaagccaagtgaatggccggagtggcctacaccttcaaaacctaaaatagaaaatgccgtattgcggggagtgaatggtgaaacggttgtggcggctggtgataaagtgaagttcaccgcacaagtcagtgatgaatataatgatttggtttcattccaattattagtgacaatggatggagccgaaatcttgaatttgtctaaaggcttgagcggacgttctgcggttattgaagaggaagctactttaccttttgttgccggtttccagaatggacgtcctgtggtgactataaaagctgtaaacgatttaggtggcaatgaatcgaccctgactttggatgaggccgcaagtgtggcggtgacccgtccggaaacaccttcccaattataccttgttgatgatttgggaaatgtgtatgaaatggacaaggagagtcagaatgaaacggattatagtttccggacgagtgcggcggatttggcagggattggcgaccattttaaagttgccgaaaagataataaataataaacctgattattccggtttggtatggggatattcagacgataagatcgcgattgtgactgatgatgcagctacttcgattccgactcctaaggtaggaagttatacattggagaatatcacttttgatatgttgagttttctggctgataagactttgacatacagcattgatattgataagtcccgcttctttgatgtgggaggaggatatgtccagttggatgttcagttggtagaaagtgccaagattaattttataggttttggtagtgatgttaccaatatgctccggccggaattctttaaagatgtatcagggagcaaagcaaaattcgatggtccgtcggtactttataacttgaaatataatacatcaaatggtttcatgtatatggaacgtccacgggatgttttttatccggaggtgatgtatattctcggtactggagtcggatttccacgcgaaccttatgtggctacgcttgcttgggacttcgcatatcctcaccaatggttcttctttaaaaaggtcggtgcaagtgcctttgaagcagtcgtttacattgaccaaactatgggatttaagttctatcggggatatggttgggcgcaagaggaggacacgaagaatctatatacggttgagcctgctaacctgataacgagaaacgctcccggtgatttgattcccggtcctgattttaaagccggactttatacaatacatattgataaagccagtgaagtgatacgattgactccttgcaattaagaggggcatgattaatagtctttaatttaatattcaatagaattatgtatatatcaatgaaaacatatagtaagaaatttctggttacgttttttttctcgatgttgccaatgttattaatgtcttgttcgatggatccggagaaagcctctttttctatttccgggaatttggagaagttacagatcggtaatgacggttttacggaggtttattcgataaagtctaatacggaatggaaatttgtaaacgagacggatcagtcttgggttaccatctcaccgaccaaaggaagtggaaacggaactgtgacaattactgcaaatgcaaatacaggaaccggacgtacggctgtattccgcgtagtacctaatggagtaaagacacaagaaattgagatcattcagggtaattcttatatccctacaactgatggagaattcccgattatagcatggaccggagtggaagcagacaagtcgctggagaaattcccggtgatgaaagcatccggcattaatatttatttgggatggtatgatgatttggaaacaacattgaaggtgcttgacgccgcacagaagaccggagtgaaaatgataacttcttgtaaggacctcttatctgtcgctactgccgaagaggtcgtaaaagcgatgatgaatcatccggctttgtatgcctatcatttgaaggatgaaccggaagtgaatgatttgccgggcttgggcgaattggtgaagaagattaaaaccatcgacagtcatcatccttgttatataaacttgtaccccaattgggcatgggggaaagaactttattctgaaaatgtaaagtcgtttatagaacaagttcctgttccgtttatttcgtttgacaattatccaattgtctctataaatggtgctccaagcattatccgtccggactggtatcggaatctggaagaaatatcggctgctgctaaagagaacaataagccgttctgggcatttgcacttgcactttcccataaacttgatgacactcatttttataagataccgacattgcctgagttgagattacaagttttcagtgatttggcttatggtgcgcaggcaatccagtattttacctatcgcggacttcaacatgacgaaccgactgaagtgtatgatttggtcaagactgttaatcaggaagtacagcaacttgcgggtatattcttgggagcacaggttatttcactatctcacaccggaagtgaaatacctgaaggcacgaaggctttgggaagtctgccgactcctataaaatcattgactacgagtgatacaggtgcggttgtctctgtcctggagaaaggtggtaatcaatatcttgtggtagtaaatagagattttcgtaatgtgatgaacctgtctatcgatatggatagttctgttagcagagtgttgaaaaatggttcaacgactactccagacggctctacgatagcagtcgaaccgggtgatatggtaatatttacgtggagaaaataaaaagatttttaatttgataaagtaaaacgattatatgaaaaagatattactttccttttttattggtgttatgttgattgcctgcaaccagaaaactgtctctgttcgtgaggtctggacaaaagagcaggctaatgagtggtataaacaatggggatggcttcgtggatgcgattttattccgagcacggcaatcaaccaaatggagatgtggcaggcagatacttttgatccggtgactattgatcgtgaactgggttgggcggaagaaataggcatgaactgtatgcgcgtatatttgcatcacctggtttgggaaacagataaggaaggctttaagaaacgtatcaatgaataccttactattgccgacaagcatcatatctctaccatcttcgtcttcctggatgattgttggaatcctgtatatcaggctggcaaacagccggaaccacagccgggagtacacaattcgggatgggcacgtgacccgggtgatctgtattataaaggcgatacggcagtgatacttccgatattggaaagctatgtgaaagatatcctgactacctttaaggatgataagagaatcgtattatgggacttatataatgaacccggaggttcgggaggatatagatacggtgaaagaagtttgccgttattgcagaagatatttacgtggggacgaacggtgaatccgtcacaacctctgtcggccggagtttgggatatgagtctgactaatctgaataagttccaattggaaaattcggatgtgataacataccacacgtatgaaggcgtgaattcgcatcagcaactcattgatacattgaagcaatacggtcgcccgatgatttgtacagaatatatggcacgtactcaaaatagtactttccaggatattatgccaatgctgaagagagaaaatatcggtgcaatcaactggggacttgtagccggaaaaacaaatacgatctttgcatgggacactccattgcctgatgttgttgaacctccattgtggttccacgatatattccgtagtgatggaaccccttattcgacagaagaagtggaatgtattcgttcattaactaaataattcccttatgataactatgaggaatatatggataatgatgttggggatatgcctgtttggttgcggggctggtaaacagcccccttcctcacagctatccttaacatggaaactggaaaaagatagtgtggaagccagatattttaagaatacattctgtctgacgaataatgggaataaatccttgactaataattgggtgatctattttaatcagacacctatttattatcagcaacctattaatgcaccgctggaaattgaatgtttgggttcgacttactataaaatgtaccccactgaacactaccaggcattgccaccgggtgaaacaaccacttttaccatattgagtgaaggaaatgtgattaatgtgtcctcggttcctgaaggggcttatatggtaactaccgatgaaaaaggaaaaccgttacaaccgcaaaatgtccccatcgagatcgagctttttaagcccgatacccaatgggttagctcgaggaacagctttccctatgcagatggaaattatttctataagcagaatgatgatttcagcaaaccggtagattgtgatatgctttctctttttcctgctcctaaaaaagtggaaaagacgggcggtgtttcttctttctctcaaaaagtctgtctgaagtttgatgatgcgtttaaagaggaagctcttttattgaaaagtcaattgacttcattattaagatgcagcgtttccgataaggatgaagaaacaatcattgaattgaagaaaatggaggttcctattacctgtcaatatcccgatgaatattacgaaatcgtgataaagaataaccggttgactttgaaagctagtgatacacatggcatatttaatgcttgtcaaacattgcttgccttattagataacatggaactaacttcttctccgatacctaatcttcatataaccgattatccggacatggggcatcggggaattatgttggacgtagcccgcaactttacaaagaaagcggacctgctgaaactgatcgatatattatcattctataagatgaatgtactgcatttgcatttgagtgacgatgaggcctggcgtgtggaaatacccggattggaggaattgacagaaatagcttctcgcagaggacataccatagatgaacagacatgtctttatcctgcgtatgcctggggatggaatgagacagatactacttcattggccaatggatattattctcgcagtgacttcatggatattctgaaatatgcgaaagaaaggcatatcagagttattcccgaaatagacattcccggacattcccgggcagcgattaaagccatgaatgcccgttatcagaaatatatagatacagaccaatcgaaagcggaagaatatcttttgactgactttgcagatacttcccaatatctgtcggcacaaaatttcacagataatgtgattaatgttgccatgccttccacttatcattttcttgaaaaagtgattgacgaaatcgtgcagatgtatcaggatgcaggagtagaactgactgctttccatgtgggtggagatgaagtaccagaaggtatttgggaaggttcttctatctgccgcacttttatgcaagagaacggactgactaagatacgggatctgaaggattattttctggaacaaatattggaaatgctggacaaacgtaacatacaggcagtcggatggcaggacattgttatgaatcctgataataccgttaacgaacattttagaaacagtaaggtattaaattattgctggaacaccattccggagcagggtggggatgaagtaccgtataagctagctaatgcaggctacccggttatactctgtaatgtgggtaacttctatttggatatggcctattgctatcatgtggaggaaccgggattgcgttggggcggttatgtggatgaatatgtgacgtttgatatgttgccttttgatatttataagtctttgcgacggaatttgaaaggtgaacctgttgatgtgaaagctgcttcaaacggaaaacaacctttgacaaaggaaggttatcagaatatcaaaggtctatccggacaaatatggtcggaaacaatccgtagttttgaacaggtagaatattatcttttcccaaaagtcttcggattggcagaacgtgcttggaatgttcaaccatcgtgggcattatctccggacggcaaagtatatatggatgccaaacggaaatacaatgccggtattatagattatgagttgccacgtttggcaaagcgaggaataaatttccgggtgtctcctcccggtattatgacaagggatggattactactggctaatactgccatccccaatgcggtaatccggtacacaaccgatggaagtgagcctacggaaagttccatagaatggcaaactccggtagtatgcaatgctccactgataaaagcaaaggctttttatctaggaaaagagagtgtaactaccgtattgtttaatagatgatatataaataaaaagctattttaataatgttagaatagctttttatttatgcatttatgaaattttacatattaaggggctgctgaaattctagctcttctttacaatattcaacaaatttaaaactggaaatatgactattaatattaattgatggttgaaatatgaatacatttttcgacttgcgttttaattaattttttcatatttttgcagagtattttttgaatattagtgaaagacatgagtaattttgtaaaaatgagaggattctttttgtttgtacttcttctcattaattgtactgtaagtaagggacagatttataagtacataggactggaagacgggttgaataatcagaaaatataccatatccaaaaagaccgacgggggtatatgtggtttctgactcaagaagggatagaccgttatgatggcaaacatatcaagcattacaacttttcagacgataacatgacgttggattcacggattgccttgaattggctttatatggacaacggaaatgtattatgggtaattggtcagaaaggtcgtatttttaggtatgattcgcagcatgacaagtttgaactggcttatgtgcatccggaactgatcagaaataagtcgcaagcatttctgaattatggttatttggacaaaaatgaccgtatatggttgtgctgtaaagatagcattacctggtatgatacccataccggaacagtgttaaatatgtcggtgccggtcgacggtgaaataactaccattgaacagacagatggtaaccatttttttataggtacgggaagtggtttatttcgtgccggaatagaagaagggaagttaaaggtgattcctgatgaagcgttggaaagcatcgctccagtgcatgaactttattaccatgctgtttcaaagcagttatttgtgggaaactataaagagggaatacttatatatgacatggggggaacaggaaaaatcatctcttgtcaattccccaatcatgtagagattaaccagattgctgctttaaacgctcatgaacttctagtggctactgggggaaaaggtgtatataagctggatgtgaatacatacatgagtgaaccctacataacagctgattatagcagttataacgggatgaatggaaataatattaatgatgtctatgtggatgaagaagatcgcatctggctcgcaaattatcccaccggcattacaatccgtaacaaccgttatggaagttatgacctgataagacattctcttggtaatacccggtcactggtgaacgatcaggttcatgatgtggtggaggatagtgacggtgacctctggtttgcaaccagtaacggtatcagtttctatcagactgatacaaaagaatggcgttccttctttagttcctttgatccggtaccgaatgatgagaatcacatttttttagcgctgtgtgaagtctctcccggtgtaatgtgggctggtggttatacatcgggtatttacaagatagagaagaagaaagggtttaaggtaacttatctttctcctgctgccattgcaggagtacgtcccgatcaatatatttatgacattaaaaaagattcgggaggtgatatctggtccggtggatattatcatctgaagcgtatcaatcttgatactaaaaatgtacgtttatatccgggagtaagttctattactaccattcaggagaaggatgaccggctgatgtggattggtacgcgaatgggactctacctgcttgataaagaatccggaatttaccggtatattgatctgcctattgaatctccctatatatgtgcattataccagagagaagacggtatcctatatattggtacccgtggagccggacttcttgtttatgacattaataagaaaaagtttatccatcaatatcgtactgataactgtgcgttgatttctgacaatatttatacaattcttccacgtcaggacgagagtcttctgatgggtacggaaaccggtattacaatctattccccccagaaacattcttttcgtaattggacacgggaacaaggattgatgagtgtcaattttaatgcaggttctgccaccgcctggaataaaagcacacttgtttttggcggtaatgaaggtgcagttaagttcccgacaaatatacagataccggaaccgcattactcacgcctgttattacgtgattttatgattgcttatcatcctgtttatccgggtgatgacggatctcctttgaagaaggacattgacgaaactgaccggctggaactagcttacggacaaaatacattttcccttgatgtggcatccattaattatgattatccttccaacattctttattcatggaaaattgatggttatcataaagaatggagtcgtccaagtcaggataaccggattcttgtcagaaatctgcctcctggcagttatacgttacaaattcgtgccgtatccaatgaagagaagtataagacttatgagacaaggaacattcagattgttataacacctccggtatgggccagtttgtgggctatggtgggatatgcaattctgttggtattggttatgattatcatctttcgtatcatcatgttgcaaaagcagaagaaagtgtcggatgagaagacacggttcttcattaatacggctcatgacatacgtacgccgcttacgttgataaaagctccgctggaggaagtcatagaaaatcgtatggtgaccgaacaggcgttaccccatatgaatatggctcttaagaatgtaaatacattgcttcagctgacaacgaacttgataaatttcgaacggatagatgtctattcatccactctttatgtttccgagtatgagctgaatacttttatgaatgatgtttgtgctgcttttcgcaaatatgctgaaatgaaacatgtcaggtttgtttatgaaagcaattttgactatctgaatgtgtggtttgatagtgacaagatgggatctattctgaaaaatatcttgtcgaatgcattgaagtatacacctgaagaaggtagtgtctgcatttccgcttgtgaggaaggaaacacgtggagcattgaggtgaaagatacgggaattggtattccttcgtgcgaacagaagaaattgttcaggaactgttttagaggtagtaatgttgtcaatctaaaagtgacaggtagcggaatagggctgatgttggtatacaaactagtcaaattacataaaggcaagattcagattcagagcaatgaacaacaaggcacttgtgtacgagttactttcccgaaaggaaatagccatcttcataaagctaaatttatttctcccaagctgccggatgaacgtccggagactatcataccgggtagtatttctgatttgccggctatggaaatatcccagataaacagttccttacaacggatcctgatagtggaggataatgatgatttgcgcaattatctggtggatatgctgaagacgagttataatattcaggcttgtccgaatggaaaggatgcacttatcataatcagggaatttaatccggatcttgttatatccgatataatgatgcctgaaatgagcggagatgaactttgttcagcgataaaaggggatcttgagatgtctcatattccggtcgttttgctgacagcattgggagacgagaagaatatgctcgaagggctggaaatcggagcggatgcttatatcaccaagcctttcagtgtaggaatactcaaggcaacgattaagaatttactggcgaatcgtgctttgcttcgtcaggtttataatagtatcgaagaggaagaacagaattttctggttaattgtactaatactttggactggaaatttatagcttcggtcaaggaatgtatagagaagaacatgggggatccggattttaatgtagaaatgcttagcagtcgccatcacatgagtcgtacgagtttctttaataaattaaaggtcttgacagcttttaaaacgagttattcaagttttaatta

SEQ ID NO: 8245 - DNA, 7250 bp, Unknown
  gut microbiota DNA sequence
ctcatagcaaacgctccatcaagtattaacacttgagttataggctattaatactttgtatttaggctattaatacttgagttgttggacatatatacccaagacgcaggatatatatatccaacgtgcaggatatatatgcccaatacattggagatatatacccaacaaattggatgtatacacccattaatctatatgatgtaagcatctctacagtgctatcttgtcatttatccttcggatttttatctttgtaagcgtctctgcgatgccgtattgttttatttgccattgtgaaggaggtgaaggatggttctttctgtattttgcatcctctttcaccataaagttttgatttatagtcattcagctaaaggtgaaaccggtgaaccttcaaaatgaatcttatagttgcaagtagtctttagacggttctgtcttaagcttattgctgtaaacttcaattaatactgattttcttttctcttttctgattttatattctatctttgcaatgctctttatcaaaatccacagcagggaagcctgctgtatctaatgtggcaagctttttttatgcttgtcccattttcctatatggcggtttcgcacccccatgtaggatgttaatgcacctactgcctgttgtggatggtgaagagcaatgggacaggcggaaccgcttcttttattccttaaaactacctttctgtatcgccccattaaacttaatttattcaccatttaattaaaattcttatggaagaagttttaagcaaccaggaggcccgtccggggaacacgacgcaactcatgcacgctatcttttcatccgatgatgaaatgatgtctttttatctgaccctcaattgttttatgaatcctgaaagctatctagtggaacgaacagatcgaaagagactggaggatttagctaatacgctttatagtaatgtggcggcctttgaagctatccgtacttataagtcgataagtgtgaaagaggtgattagaggattcggcgcgcacatgatgaatacgcaaatctccaataccaatcgtttccagagtgctgatgcagtgggaacgttaatgaattgtatactgaataccactaaaaacagttggcaatttaaaaaaatggatcggaataacaatatacatcttcagaatgtacgatacttattgaatcgtttggatgcggcagaatctaatgaagagaagaatcgtgaagaagtagcggtataaacagctttatagagctcatttagtgattatggtttagttgagagtatgatatgagatacatcacatgtgacgctatcgctaaaccctaatcattttgtcaatgatagaaatatttatagataatgacagtttgaagcggtaaacatcttcctccagatgggagggctacaataacttcatgaactctgttatagttacaatttttgtccggttatgtttttctaggactaataaatctttgtctccagtaacaatgtagttagctttgatcgtatcggctagagagagtaaataaagatcttttttgtctctaatctctgatttgctttttgtttggatgacgacatattttccgtataaatggataagtttaagtgtatcgtctagatcttccggacgaatatattttcgtattttctcccgcgaagaaacatcatagaattcatctagcagctcacggcatacatatatttctaacgagggatgggtaagtaatgtgcgcatagtcgcaatcttgcgtcctagcatgaatgaaatccatagatttgtatcaataattattctcatttctcgtatcttatagcatttaattctgcaagaatctcttcttcagaaagattcactctttttggacgtgatgctatatagtcttttaaaaagtcttctctgatatcaatgtcccaacccattttctttgcaagctctttgaagaattttatatcagactttggtatactcaagaaaataccttgattcatagttgtatccataactatttccctttcattattaagtatctaacgaatacaaagataagaaagttctcttgtttctcaaatcatttatcatatctttatttcactttagcaaaaatgaaggataacatactgggcacaaacaatgtgaggttatcgcttgcccagtaccaacagactttccggtcccatattgaacaacaggtctatgatactcaaattaggcaggaaacccagtttggactcgaaaacctgatagtaaggttgcggaacaaactctgtatccacttccctgaaatcctttttcggatgaattacttcccgaaaatcggattctccgggagcaaactccatcttatattcggaagtgcgctcaatggtggggtgaatatcgatcaattcacagaccatccggcagagttcttcattgaaatcgattaaaaactcgtatttcttttcatagaaagggcggaagtcgtccttgtagtactcaaagaaaggagtattgttgtaggccgattcgatggcgttccaatgtagatgtctccagttaccgtggtcggagatgcggatatccttcattgggcacttcaatgtatcgggttttacggttgggatggaaagagctaactcacccgatgggccggcaatggtgcaccggttgcggtaggtttgttttatatagtggtcgtattgttctacaaataccttgtcataagccagtagtttggtataatattcaatgggagcgagataggctgaagataaataagcgatgttcatttctttcattttaattcgtttaggaggctctgttattaaggatattatgagatattatgaaggggttgtttcttttatgatccggaagattatttcactgttctgaagaaacggttccatcgatatccgtcaaacaaacctgtttctttttctttagagaaccaaatgatggaggcttttccgatgatatggtcttgcgggacaaatccgaagagccgtgagtcggagaagttgacggtattgttagaccccatccaatagtaatctttggtgaaataacagtgttgtgtgggttttccgtccacgtagagagtgtcgttctttatttctgcctgtttgccttcgtgcatcacgagggtattccgcagcaaggtcatgttccagggatagactcggataaatttcccttttccggggacaatcagcggatttggttcggcatcttctttgtttgacaaaggttggacgaaactctctttcccattcatggcctgttccaacagataatattcgtaacggctgaaactgcgtacatgggtgctgtcattacttcccatcaatccgtcgttggtgatggaaagggtatgcatgagtgacgtaatcagattttcttttgaggcgggatacgaataaagtcttttcttatccgggttaaactgtgcctccggagaaataacggagaaaagagaatcgaccaataacgtatctcccggaactccgagacagcggctgatatagatttcccgacggtcgatgagaggttgccggattccggcaggattattgaatactacgatgtcttgccgacgcacaggactctcgcaccagcggtgataagagaaaagcgacatgaaaggaatccgcagcccgtaactccatttgttgaccaggatacgttcaccctgaaaaatggaattctccatgccggtggaagggataaggcaggacgtgaaagcaaatccccggagcagaagcactacggctactgctccggcaaatgctagtatccatttgaatttacgaatgttcatcaacttttatcaccttatcactctattctatccgtacacttatcagtctacccacttgaagaggcggttccagcgaatcttgccgtcgaaccatccacggtctttgtcaagcgatagccatacaacaatcggtttgcccactacgtgatcttcgggtacaaaaccccaataacgggagtcggcggagttgtgacggttgtcacccatcatccagtaataatccattttgaaggtatactcgttggtcttttcaccgttgatgtagataccgtccggtttcacttccagcttattgccttcgtaggctacgatgcaacgctcatagataggcaggttgtcttctgtgagggtaatggtagctcctttggcaggaatccagatcggaccgtaattgttgcggttccatttggtataaagattgagcggatacatctgtccggcataatcttcgggttccattactattttgctgattagctttttgttgcccaaaagcgtttcatacatcttcttggttagcgggaaatgatataccggattcagtttgccctgtgcattccggctgtccagtcccatttccagcagtccgctttcccagccggagtcttctatcagcatggtgtcgtccttgctgatacccagttcacgaagcatatcttcgggaatgtacggaccagtggtctgtacgaaatagttgaattgcaggttttcggggttctcaatcgctttaccgtcaatcatcacctgtccgtctacaatctgaagggtatcaccgggcaggccgacacaacgcttcacataattctcgcgacggtctaccggacgccagaggacttctccgtaagtacgcgggttgttcattatttgtttacgtccggcagcatagtacaaatcataaatagcacgttgctgggcgcgtgtcagactgtccatttcaatctgtttggaatagatacgttgtccctcgccgtaagccagcgtatagaagtccgttgtctgttggtagttcactgctaccgtatctcctgcggggaaattgaagacaacaatgtcattcagtttcactttgccgaagcccggtacccgtttgtacttccattgtggccactcgatatatgatttagtattgaagacaggtaatgtatgctgcgccaacggcatggaaaggggagtgttcggtacgcggggaccgtaactcatcttgcttacatacaggaagtcgcccaccagcaatgatttttccaatgaagaagaaggaatctgataattctggaagatgtagatattgacgaagtagacagcaaccaacgcaaacacgatggcgtctacccagctcatgacactgcggacagccggattcttcgacttcttccaaaaagaccagggaattttctttgtgatataaatatcgaaaatgaaaggaacaacaatcaatccccaccaactccgtacccagattaggaagatgaggtaaagtagaatagcagtggcacatttgatccattgtgcgcgtgtggcttgtctcataatgttatatttgtttagaactagcttctgatattttagtcatttaagaacgggaataaatcactcatacccaaaaaaccttcgtgtgtggcagtatattcggctgccaatacggctcccaatacaaacccgccacggctcttggcatcgtgggtgatagaaatggtgtctacatcggactcataacggatggtatgaagtccgaaaacttcgccctcacggatcgagctgataggaagttcgttaggagcacaatcgttggttccgctaatggttccgtccggcgcaaggaaagttcctttcacccatttgtctttacggtctatcttttccagaataccttccgccagtgtaatggctgttccgctgggggcatccagcttgtggatatgatgtgtctcgctcatggtgacatcgtatgcagggaactgattcatgattttagccagatacttgttgagagcggagaagatgctgactcccaggctgaagttggacgaccagaagagtgttttacccccttccgtgcagagcttcttgatttcttcgccgtgctcggccatccatccggtactgcccgataccagtttcacaccggctttgaacgctttcatataattgctgtaagctaccatcggattggtaaactcaatggccacatcggccgatttgaatgcttccgattcgaagtcatcctgattattgatgtcaatgatgcagacgatttcatgtccgcgactacgggcaaccttttctatctctttgcccatctttccgtaaccgatcagtgctattttcattgttttctgacttatattcaaaataatagtcgcaaagataagatttttattacatttgcagcgcacattaacgtcttgttaacatggaacatcttctccactacgtgtggaagcataaattatttcccctgaaagtactgcaaaccaccaacggcttaccggtagaagtgattgaccccggtctgcaaaaccccaacgccggtcccgactttttcaacgcgaaactaaagattgacggcgccttatgggtgggaaacatcgaaatacatacacattcttccgactggttccgccacggacatcattctgacaaaacatacgattctgtgattcttcatgtagtaagcgaagcagatacggaaataacccgttccaacggtgaacagataccgcaactgttacttacctgtccggaaaatgtgcaattgcattaccacgaactttgtgtcgcggatcattatccggcttgttattccatccttgcctctcttcccaaacttacgattcattcctggctgaccgctttgcaaacggaacgtttggagcagaaagcgcaattaatcacacagcgtctcaaacattgtaacagtaattgggaagatgcgttctttatcacccttgcccgtaatttcggttttggcttgaatggagatgcttttgaaacgtgggcgggattattaccgtttcgtgcgatggacaagcaccggaatgatttgtttcagatagaggcttttttctatggtttggctggattgttggaagaaacgtttctgaaaaaagaacaggaagacgagtatagtctccgtctttgcaaggagtttcgttatttgcagcggaagtttgaaatcgggcaggggatggacgctacgttatggcgttttctacggcttcgtccggaaaactttccgcatattcgtctggcgcagttggcttatctctatcagaaaggggataagttgttttcacgtttgctggaagcggaaactctggcggatgtgagaaccttgctggatgcccgtacgtctccttattgggaaaatcattatttattcggacgactttcttcacaaaaggagaaggcgatgggagagcgttccaaggat

SEQ ID NO: 8246 - DNA, 5746 bp, Unknown
  gut microbiota DNA sequence
tcccgattttgatgttcccaagacattggtcaataaagaccagtggccaccggtcatgcttagttccgctactttcaggtatccgggcactcacggggctatgtccggcacttactctcttaaactttcgacgagacctgttgccgctccttatacggagattccggcggaaggttgtctgggacatgccattaagcggctttcgttctctcgtccgggctgcaaatatttgcagatagaatgttggtttacatacacggcggagcaggatgtggtggatggcggtgaccgtccacaaccgggtttgcatgagagttccatccgcgattttggtatgggattcgatgtacaggagggtggaaaacgttaccatgtaggaattcgctatctcaatgcagtagatggcaaattaatgcagaagtggcagtatgaacattccaatgaagacataaccgaccgcgattgggcttatggacttgacggagactggtgtaagaggggagtcgatccctggtggttcggccgccgttatcctaatggcgaccacgatggattcaaggatttgaaagatggtcatcagaaactcatttacaatgagaccgactgtaaactcaattggcaatacatgcgtctgaaacttgacacggagcttcgtgaatatgtagagttccaatgtcaggacaaaatttgggatatgcgtggcattgcagctgataccgttgacggatatggacgcatcgacaatcttatcaatcctcttttctgggtgggtactgataccaatcgtcgtgtattcttttatatagattctgttgttgtttcacaagaataaaaggaggaatgtaatatatgaaaatgtttaatgattcccatcttgaggtaaagaaattctttaaaggcactttcttcactcatccttacgaggctggttgggcagatgaggctatattctttgttatggttgagaaaatagaaggagatcccgtattcgaaggtcgtgtacaactatcgcaagacggtatacattgggctgacgacggtagtgagcctgtaatcttcaaaggacttggccaacatattataaaggtaaattcaaattttggtaattatattcgtcttgccgtcagcattgaaggcggagagatgtttttaaatcttcatatagcatgcaaaggttaatatttatacttagtctgttcatccttgcgattgtaggatgcagctccaatgagtctcactcatttttgattcgtccggatggaggtggggaagatgctgccactgaaatagaggtaggtaaaacgattcctgcctggcaggagggtgtgatggatattcatttcatcaatacgactaccggtgaaagcatgtttgtaatattcccggatggtacgcaaatgcttattgatgccgcaagttcgagtgttacgaccaactctaatagtaatacgaccaacaccggtatccgtagtcgttgggatccgactctgacttctacccgtggttcacagattataactgattacattcgtaagtgtatggtatggacaggtaacagtacgattgattatgctgtacttacccacttccataatgaccacttcggcggttatacttcttccttgccgaaatcttccaactccgacacttattcgttgataggttttgccgagattttcgacaatttcaagattggtacgcttctcgatcgtggctatcccgattataactatccgttcaatatggcgacaatggcagacaatgctccaagttgcagcaactatatcaatgcagtgaaatggcatgtcgccaatcaaaagttcgatgctgcgatattcaaagcaggggcgaataatcagatcgttcagaagtataatcctgcaaagtatcctactgcaaaggtgcaaaacgtggcagtgaatggagagatctggacaggttcgggcactactacaaagaagacattccctgaactctcggagattacatacgaaaacagtaagaacattacctccagtgataattgtccgccggagaatataaccagttgtgtgatgaaagtttcgtatggcaactttgatttctttgccggtggtgaccttcagtataacggacgttcgagtcatgcgtggaaagatgccgaactgccctgtgcaaaagcagtgggtcaggtggaactattgaaagctaaccatcacggtgtaaccaacaccaatcaggtggatgctctgaaagcactcaatccacaaacgattgttgtcaattcgtgggtagattgtcatccccgtaccgatatactgaattcgatggagacaacactccctgcgtgtgacatgtttatcactaacttctggcaaggcgatcgccccagcggagtagacgaccgggttacggcggaagaggctgcgagagtaaagggatatgatggacatattgtagttcgtgtgaccgatgggggaaacaaatacagagttgtgacaatcacagattctgacggggcaatgactgttaagactatttccggtccatatacaagcagataatgaatacaaaatattatgatgtaatagtagcaggtgcaggtcctgccgggatatgtgcggctgtagccgccgcccggcaaggagcacgtgttgctcttatcgaaagatacggagtcatcggaggtaacctgaccgccgggtatgtcggccctattctcggtagtgtaagcaagaacacgatgcgcgatgaggtttgtgctattcttggcgtcaaagacaatgactggattggcgaacatggaaatgctcacgattttgaagaggcaaaacttacattggcagaatttgtcgccagggaaaagaacgtcgatgtctttttgcaatgttgcgtgtcggatgttattcgtgacggaaaggtggtaaaaggcattaagtgtgcaagtaacgaggggacgctctgttttgaagccgcggttacgattgactgtaccggtgatgccatagtatcttttcttgccggtgcaaaaatagaaaaaggacgtgctgacggactcatgcagcctgtaacccttgaatacaccattgacggcgtagatgaatcgaaaggaattatctgtattggagatgtagacaatgtccaattgaatggcgagtgttttcttgattggtgtaaaaagaaagccgatgagggcaaacttccccggatgcttgctgccgtgcgtttgcatccgtcggtcagaccgggttgccgtcaggtaaatacgacacaagtcaatagggtggatattacttcggtaagctctattttcgccgccgatcttgaacttaggcaacagatacgcctcctgactcaattcttgaaagaaaatttgccgggttacgaaaactgtagagtgatcggaagtggtacaacaaccggagtgcgcgaaagccgcagggtgatgggcgactatgtgattgatgccgatgaaatggcggaaggctgccgttttgccgatgtggtggtacataaagcattgttcattgtcgatatacataatcctgacggagccggacaggcggaaccgaccatccaatattgcaaaccatacgatttgccgtatcgttgttttctcccgttgggcttggaagggcttctggtggcgggacggtgcatatcgggtactcacagagctcacgcttcatatcgtgtcatgagtatttgcatggcgatgggagaggctgttggtattgccgctgccatgagtgcgtcgcagcattgtactccgcgggctctcgatgtaggagagttgcagaaacggcttgagtcgttaggcatagagctgttcgattaacgtagaacataatcatactttaaatttatagagcatacttatgaaaaagatctatttgtctgtcgtgtgcttactgatctctattccccttatcgctcagttgtatgtagagccggagaaagaggtggagtgctctgtcttcctggcaaaggaaggacgggggcgggcacagcaaggacttgaaatatgggatgattacatattctcgtgcgaggatggaggacacgtgaatatctacgatttcaaaagtgccgatccgaaacctgtggcaggctttgaattggcgtcctcccatccggacaaccatgtaaataatgtatgctttggcgtcgagacaaaacgcggagcatcgtttcctctcttgtatatcacaaacgggaaggtaggaagcgagttggaatggttgtgctttgtggagagcatcacccgtcgtggaaaacgttttagcagcgaaatcgcacagacaattgaactcgatggctcgaagtgggcggagaaagggtatgtctccatctttggcgcaccaagctggctggtcgatcgggaacggggctttatatggatattctcggcgcgtaaacgtactgtggcgaaggtgacaaagcatgcatgggaaaatcagtatgtcgccaccaaattccgtataccgtcgttgagtgagggcgcaaaggtgcggctcgacgagaatgacattctcgatcaggtggtgttcccctatgaggtatggttcacacaagcgggctgtatgcatgatggtaaaatctatttctgcttcggagttgggaaacaggatgacagccgtccttcctgcatccgggtgtacgatacggataggcggacgattactgcccgatacaatgtgcaggaacaggttatttacgaaccggaagatattgtggttaaagacggggttatgtatgtcaataccaatacgaatgcgaaaaagacgtctgatcttccttgcatattcaaactctctcttccgaaagaaaagccggtgaccgaaaatcctctcgacgagatacgcagggatccggaacgtgcgggcggcgtgtattatgtgaccgatctttcacatccggttacgccggcgcccaaaggatatacgcctttctatataaacggctatttccgtcatggagcgcgtcagatagacgatgaggtgacttatcctgccatatacggcgtattggagaaagctcatgccacaaacaaccttaccgattttgggaaagccctgtacgaacgtcttaaaccgttcaagaagaatgtgttttacaaagaaggcgatctgacacaaatcggttatcgtcagacaagggagataggccggaggatggtacaaaactatccggaagtatttgaaggccatccctatttgaagactaacgcaacgaatgtgcttcgggtggcggccaccatgcaatctgtaaattcgggtattttgtcgctacgtcccgggcttgaatgggcggagatagacaactcccgttcgttccttgccacactgaatccctacggtaacgtatgtcccgacaggagtccgcttgataagtatatactcggtaaggaaaacagttggtataaaaaataccgttcatatatagatgaaaagttggatgtggatgctttttttacaagactgtttatagatgtaacacaagtagaaagtgagtatgacaagtacgacctgattcatcgtttctggttaatggcatcgctgatgcaatgcctcgaccgccaagtgcctatatgggatatctttacagaagaggaaatattggcttgggcagaaatcgagaactataagtattttgcgcagaaaggtcctgaaccggtatctcacgggcgtagttggggacttgcatcccgcacgttacgccatttgttagacgaatctgccgaagatctggttcgcaagcgtcatgg

SEQ ID NO: 8247 - DNA, 8384 bp, Unknown
  gut microbiota DNA sequence
gtggcggggagtgtggaattattccacactccccgccacagttcttttatttaggtaatctatttacttaatttcatccggccagggacaaggtttacctgtcgctttgaaagtcggtcgttgtgcatctacttttcttagaaagttgcccagctctttagaaagtttcttcacgatgtccggatgctgtgcactaaggtcgttgctttctcctatatcatcaggtatgttgaataactctttctttcctgttccatagtaataaatcaatttccagtcaccgtttcgaacggcacaattaaagttgattccgggaccgtcatttccccagttgttaggcatattccagaaaagactccgacccttagctgggttgcctgtctgtttcagcagagggatgaaactgataccgtctatcggttgaactgtctggtagttcttgacacctgctatttcaagaatagtagggtagaagtcttctatcaacaagtagttgttgcatttgcttcccggagctactactcccggccaactgacaatcatcggttcgcggataccgccttcataagtagaacctttaccactgttcaatggataattctgtgtatgcagcttgccgtcacgccatccggattcggatgcaagtcctccgttatcactcataaaaatgataatagtgttgttggcttctccattcttttccagccagttcattaaatcacctaaacttttatccattccttcaatcagtgtggcataagcagcttcatggtctgtcattccttttttcttgtacttctcatagaagcgcatatctttgttcaaaggaatgtggatggcatattgcgacatatacaaatagaaaggctgattatactttttcgctttatccagtgctttaatggcttccaacgtcaatgcttcagttacaaaggtttccgttccccaatatttctctaatccgggaacagacatcagtgataccgctttcccatctttggtatgtccgtagttctcttctcccaggtaactggcaagtccaccggccgcatgtccggcaatatttacctcgaatccccaatgatgcggatcttcccctggagtatctatcgctccgaaatgggcttttccacaatgtatagtatgataaccgctgttctttagcagttgcacgaaggaggttcctacgaaagtatgattagtgccggacacttgacttactccattgtaattccagtcagggactgccagaatgctatctttacggtctgtcattgtattcttttgcagagtccagttagttactcggtgacgtgcggcgttggttccggtgatgaggctgcaccgggtaggagaactgatactgttggcatacgcttgagtaaacatcattccctgttttgctaaccgctccatattgggagtctcgtacaattcgttatagtgtgtcttctgtgtccagaatgggagtgaagtatcctgccatcccatatcgtctaccataaagagaatgatattcggacgtttgtccgcgcgttctatttgcatattgctttgtgcttgcagattggttactgcgagtggcacaaatgcaaggggtaataatgtttttttattcatgggggtcattttattctatggaatatgcattaaaattaataatatctggtaatgcgatagattcggttaaagataagttcgagcactacaaaaaggaatcatttctcaccgtgatgagaataaatactcatagtaatgagaactttttctcatcgcattgagaaaattttctcataggcatgagaacacttgagaaaatgcaagaacgtaacttgttacaaatcaatattgtataatttcaatttattatataaagtctttcgatcaatattcagtaattgcgctgctttactcttattgtttcctgtttggcgtagcgcctccaaaatatgctctttttcagtctcttcattgcgtaatgcaatgctcgtattgctggatgcaggagtttctaaaagctcggtccccaattccaataaagtaatgaaactgctttgtgccaataaagttgctcttttgacgatgttcttcatttggcgcaagtttcccggccaatgataattcattaaagcttgcgatgcttttgcatcgaaacctatcaggtgtttatccagttccttgtttgcctgatcgaggaagaaattggcaaagagcagaatatcttctttccgttctttcagatcgggcatacggagggtaaattcattgatacgatgataaaggtcttcacggaaagtacctttttcaatggcttgttccagattctcattggtggcagataccagacgaatatctaccgatatctcctgtgtagaacctaccggacgtatttttctctcttgcaaggcacgaagcagttgtatctgcacttcataactaaggtttccgatctcatccagaaagatagtaccaccgttggctgcaacgaaagcccccgttttatctgtcagagcacctgtaaacgaacctttcacatgaccgaaaaattcggaagcagccagttctttggggatagatccacaatctacggcaataaacggtttatcgtttcgtttgctaagttgatgaatacggtgcgccacatactcttttcctgttccgctggaaccgttgataagtacggacatattggtcggagctaccagacctacataattgtagagttgtttggctgcatcactttctccttccagataagcacgatgattttctgttgaatctttagatgaagtagaagcaccttttttagaagaagatttagcaacgttatgagtagcaggactcttttcagactgcagacattcagaaattttcttcagtaattcttccggatttaccggtttggctatataatcacgtgctcccagtttcattgcctgtacggcggattgtatatccgcatagccagtcatgatgattaaaggaatgtccatgccttgttcattcatccatttcagcagatcgataccttcgtggtcgggtagtcgcaggtctgataaaatcagatcgacgttttggctttcgatatgttttcgggcgcgggcaatattactcactgatgatacttcaaagccctttttgcctagccaggtttttagcatcattccaaaagtgatatcatcttcaacgatcaatatggagctcatcatgtcaggttttgattcttttaagtcacaaaggtaagaggatttaggcgaaagtggtatatttgcaaacttaaattaaataaaagtgttatgaaaaagattctattgataatattaaccatatcgtttagcggacttactgcctgcaaaaccggaacaaaaaaaggaggagacatggataaagaaacgttggtaaagattgagacaactgtaggagatatcgaggtgaaactatataatgagacaccgaaacatcgtgataattttatcaaactggtgaaggacggtgtttatgaaggcacactgtttcatcgtgttatcaaagattttatgattcaggctggtgacccggactcaaagaatgcaccgaaaggaaaaatgctgggtacgggagatgtaggttatactgttcccgctgaatttgtatatcctaaatatttccataagaaaggtgccttgtccgctgcccgtcagggagataatgtgaacccgaagaaagaatcttccggttgtcagttctatatcgtgacaggtaaggtgttcaatgactctaccttgctgggtatggaaagccagatgaatgagaataagattaatgttattttcaatacgctggcacagaaacacatgaaggaaatttataagatgcgaaaagcaaatgacgaaaacggtctttatgatttgcaggaaaagttgtttgcagaggcacaggaaatggcagctaaacaaccggaatttcatttcactccggaacagattgaagcctatacaacggtgggaggaactccgcatctggatggcgaatatactgtgttcggtgaagtagtgaaaggtctggatattgtggataaaatccagcaggtgaaaaccgaccgtagcgatcgtcccgaagaagatgtaaaaataacaaaggtgacaatacttgactgaaatatatgaaaatcaacaggcatattcttgataatgggttacgtctggtacattcgcaggacgaaagtacgcagatggttgcccttaatatattatataatgtgggagctcgcgacgaagatcccgaacataccggttttgcccatttgttcgaacacctgatgttcggagggtcggtgaatattcccgattatgatatgccgcttcaattggcgggtggagagaataatgcctggacgaataatgatataaccaattactacctcactgtacctcgtcagaatgtagaaaccggcttttggttggaatccgaccggatgttgagtcttgattttagcgaacggagtctggaggtacagcggggagtagtaatggaagaattcaaacagcgatgtttgaatcagccttatggggatatcggacatcttttgcgtcctctggcttatcagacgcatccttatcaatggcctactatcggaaaagagttgtcgcatattgccaatgctacgctggaagaagtgaaggcattctttttccgtttttatgctcctaataatgccatattagctgtgaccggtaatatctctttcgaagaggcggttgctttgacagaaaaatggttcggctctattcctcgtcgggaagttcctcaacggaacctgccacaagaacaggaacagacggaagaacggcggctgacggtagagagaaatgttcctctcgattctttatttatggcataccacatgcctgcccattgccatccggattattatgcatttgatattttgtcggatgtgttgagcaacggacgttccagccggttgaaccagcgtttggtacaacagaaacaattattttcgagtatagatgcttatatttccggcagtgtagatgcggggttattccatattagtggtaaaccttcggcaggtgtcaccctggaacaggcggaagcggcagtgcgggaagaactggaactgttgcagcaagaattggttgacgaacaggaactggaaaaagtgaagaacaaatttgagtccacccagatattcggcaacatcaattatttgaatgtggcaaccaacctggcttggtacgaattgcttggccgggcggaggacatggaaaaagaggtcgatcgttatcggtctgtcacggctgaacaattgcgggcggtagctcaatctgctttccgtaaggagaacggagtaatactatattataagaaacaacaaaattaaattctccctttttataatctatcagtgaaaggggaaagtccctttgcctgaaaatggagatacgtttaggtaacggaaaagtaaatgagacatatttatagtacatataaagagcattataaagcactaatttttctcggactgccgattgtgatcggtcaaataggagtaatcgttcttggatttgcggatacgttaatgatcgggcatcatagtacgattgagctgggagcagcttccttcgtcaataatgtgttcaatctggcgattattttcagtacgggtttttcgtatgggctgactcccattgtgggaggtttgtatggaacccgccagtatgcccctgcgggacaggctttacgcaacagtttgctggcaaacctgatggttgcattgctgctgactgtctgtatgactgttctttatctaaatatagaacgtctcggacagccggaagaattgattcccctgattaaaccgtattaccttgttttgctcgcttcactagtgtttgtcatgcttttcaatggattcaagcagtttacagacggaattacggatacaaaaaccgctatgtggatattgcttggtggaaatgtcttgaatatcataggaaactatatcctgatttatggaaagctcggattgcccgagttaggtctgttgggagcaggtgtcagcacgctgttctcgcgtatcgtgatggtgattatatttatcatcatctttatgcgtagtccgcgttttgtccgctataagattggctttttccgtttgggatggtcacgagctgtatttgggcatttgaatggtctcggatggccggttgcttttcaaatgggaatggagacagcctcctttagtctaagtgcgatcatgatcggttggctgggtactatcgctctggcttctcatcaggttatgctggctatttcgcagtttacatttatgatgtattacggtatgggtgctgctgtggctgttcgtgtcagtaacttcaaaggtcagaatgatatcattaatgtacgtcgttctgcctatgcaggttttcatctgatgatgacattgggcgttgtgctttctttgattgtcttcctttgccggaattacttgggaggctggtttaccgacagtcaggaagtggctgctatggtgacctctctaatcttccctttcctcgtttaccagtttggcgacggactgcagattactttcgccaatgctttgcgtggaatttcagatgtaaaactaatgatggttatcgcctttatcgcctatttcgttatttcgcttcccgtaggatatttctgcggctttgtaatgggatgggggatagtaggtgtctggatggcatttccttttggtctgacgagtgcgggactaatgctctggtggcgtttccactacatgacaaaactccccgaaccccaccccaaaacctaatacttaatacttaatacttaaaacttttatcccaatggcttccttccgttttacaaagttgaaaataaccgccggttacactttgttactggcgatcctccttttctcgctggtgtttgtacatcgtgagatggaagcattgtcggcagccgacgatcagcagaacttaagaactgatagtctattgacccttctccacgagaaagatcaaaacacgattcagatgttgcgggtgctaagtgaggcaaacgacagccttctctctgcttcggaaatcgaagaaatcatatccgaacaggattctgtgattacccagcaacgggtacaacatcgggtcatcaccaaacgtgactcgttaatcactactcctaaaaagaagggattcttcaaacgactcgccgaagtgttttccccttctaaacaagacagtgccgtattagtaaatacatcgttggaagtagccactgataccattctccaaccgaccacttctaaagattctcttcagcagaaaatccgcatggctaccgaagaaaaacggttgcaacggaggaaaacaatccgacgtaccagtacaaagtaccagcggatgaatacgcagttgacggcacggatggatagcttgattaaacagtatgaggaagaaatgaccttgcgtgcccgtcaggatgccgaacttcagcaggaagtgaggatgcggtcggcacgtatcatcggcggtatcgcggttggtgccgtactattatcggcttttttcctgatattgattatgcgggatatttcccgtagcaaccgttaccgccagcaattggaggtggcgaataaacgggcggaagatttgctgatcgcccgtgaaaaattaatgcttgccattacccatgattttaaagctccgttaggctcaattatgggatataccgaactcctgtcccgattgacagaagatgaacggcaacgattctacctcgacaatatgaaaagttcttcagaacatttattgaagttagtcagtgacttgcttgatttccaccggcttgatctcaataaagcggaagtgaatcgcgtaacctttaacccttcccagctattcgacgaaatttatgtcagtttcgaacctttgaccgctgccaaaggtttagccttgcaatgtcacgtcgtcccggaactgaatggaagatatatcagtgatcctttgcgactccggcaaattgtgaacaaccttttgtccaatgccgtaaagtttactcaaaaaggagaaattagcctgacagccagttatgattcttctaagttaaccatcgccattgccgatacaggaaaaggaatggcatcagaagatcgtgaacgtatcttccaagaatttacacgtctttccggtgcgcagggggaagaaggtttcggactcggactctctattgtgaagaaattggtaactttgcttgaaggaaccattgacgtgcaaagcacattaggaaaagggagctgttttactgtaactttacctctttatccggtaggtaaattccttgcagagagcgaatctccggaaagtgaatcttcg

SEQ ID NO: 8248 - DNA, 6068 bp, Unknown
  gut microbiota DNA sequence
cggataaattgagtagtaggatgcacctgcaaactcaaattacctccgcccatcgtatccaaaaagtcgaaacgaatagggaagtcttttccaaagcgtgcctccaccggttcaccaagcaactctttacttttcagtaaaaccaaatcaaccgaaggcagctcaaagcgtactccgttcacttcaaaataaaggctgttctcttcaggtacacagtcaaagcaccagccgaaattttcacgttcacgatccaggtcgcaaacctctttcatccattgaccaccccagggagccggatcgaagaaaggaactacccggaacggtgtgttcaccgttgcctctacccctttaaagaaagtatccttatcaatcatcttcggtgtcccggccacatgggtgtcaatccagaattctaccctgtcaaacaatctttccttatacctatcacatactctccaatcgttgaaataccctctcttgtattgcaaagaaacagcatcgttccgattgtctatacctaaagcttttacctcatgccggcggaaacgttgttggatttcccaacgtgccatatccgcataaactaccatcgcatcctgtggagcaacaacagcagcacccgtacctatgattacaatggtttcttttgcttcactgatttgcttccgtgcagcagccaccttatccgcatccaaataatcttccagcttcaaattggtaacatagccgaataacacatcttcagtcatgacgcgttctgtcaacgtttgaatttctttttccggtttcatcaaatcacgtacattcatcactcttccggagaattcttttgaaaaagcatccagcacttcttcttcatatactcctgtatataaatccacagccagcacttttcttgcatccattttcttttttaacatagaaatgatactatcccaaccctgaacaagcatccccgtcagcttcgtagaaggaaatttatcataattagcttttctcatgtttatagcgtttttaaattttatatgttcatacatactttcaattgtgcaaatatatagattttatttttattccaaacaaaacttggattattttttgataaatcttatatttgctgaaaataaaccaatcagaatagatatgaaattagatcataatagtgataaaccgcttcatattcaggcagaagagatactaagaagactcatagaatctgaagagtacaaaaacggaaagctatttcccaatgaggtcgaattgtctgaacaattacatatttcaaggaacacattgagacaagctatcaacaaactcgtgtttgaggggcttctggtgcgaaagaagggctacggaacgaaggtagtaaagaaaggtatcgtagggggagtaaagaactggcttagtttctcacaggagatgaagatgttaggtatcgagattcgcaatttcgagctacatatcagtttaaagcgtgcaaccgaagaaatcggtacgttctttgatttaggttccagtcccgacactcgctgcgtagtgatggagcgtgtcagaggaaaaaaagaatatccgtttgtttacttcatctcttatttcaaccccaatattccactgacaggagaggaagattatacacgtccattatacgaaatgctggaaacccaatataatatagtggtaaagaccagcaaggaggagatttcagccagacttgcaggggaatttattgcagagaaactggagataaaatccaatgaccctatattaataaggagaagatttgtttatgatgtgaacggagtacctattgaatacaacgtcggatattatcgggcagacagctttacttatacaatagaggcagagagatagaccgtatgttcatacatatataatataaggaggctattttagaagttgaaatctctatctttcctttaaaataacctctttatatcatctctctttccataatcatgtcctacccgtcatttattatcgaactaccattagagcatccggcaagaatccgatccagactttcatccacaacacctatcatctgaagtttggataataaatgatagtaagaagtttttcctactccttctattctcaacagacttttccaccctcttcccgatacgatttccaataaatcttttactgttcgaacatcttgattatacaagacattagccaaccgagtatcagctactttacaaacaggcaattgaagtatccactcctcctgcccaacatttatattcttattattgtctgccaaagataaaaaacgagcatcgatagcacgctttcgataagtagccaatatatcttttttcagtttcaaccctttaagtatagagttatacatttgcaatgtcttcccataggtaattcgatgccgatcagccactttcgctactgattctcctgtagaaattgaatagaagatatcgcgggtaacagggtgaagaatcaatgctgacagttcacgaatgattatttcatatagcggtttacaagtcgtctgtgttctcaatacatatagtagatcatcgtatttggaaatgataaagtcccgttccagtttcttttcttctacgattttagaaaggtaacctgcttctaaaccaagtcttttgtgagcttccagataagcatccaaactctcatcatccaaaaacaactgatcgttgattcgggaactcgtaatgtatccaagatttgcccaatttctaagaatcgtctcctggatgccgtgtctttcagacatctgttttgttgtgagccaatttgacataaaaaaacggaactagattaataatattaactagtcccgtaccttttattataaaagagtacggagctgtcacatcccgctagtaggaggtagtaacggctacccaatgcatacgggcagacagcccgtaccctatgagaagtcatagaagtacaggcgtcttcccagcatgcattaaaaaatccgttacaatttcctactagccgaggaaacgcacaatcgcacaccacaaaggcgtgctacgttccaatgacaaaggtacaaatacttttcggaaaataacaagagagaggtataaatgtttaggaaagaaaacgaatgatgattgtataattaaagcgtatgtatataaatagacaggcttcaattagttatcttattcatataagaaaccactctacaattaaagcacctctctcttgtataaactagctacttttgtagcacacatcaattcgttccacaaatatggaacgaaacaataacagatgtggaactaaagggaaacaactgtggaactaaaagtcaacagctgtagaacgatttaacagtaactataaaaccactaaacattagtatatgagtgcaatatatgacttatttgagactcctagtccaaacaaagaagagaaacaaccgctacatgcccgtattgtctccaaaggaaccgtagataaagaagagtttctggatcgtgtccacaaatttaccggtatcagcagaagtttattggcaggagccatggaagcctttgccaatgaagcacgggatttactagccgacggctggaatgtagaaatgggaaacttcggattcttctctacatcgttgcaatgtccgccggttaaagataaaaaagaaattcgggcagcgtctgtccaaatgaaaaatattaatttccgcgcaagtcgtccattcaagaaagaagtaggcgacaaaatgaggctgcaacgaggagaatctatcacacgccctaagaaaaatagtatctcccgtgagacgtgtcgcgaccgcctcaacacatatttggaaaatcacctattcatcagccggacagattatagccatctgacaggacgaaataaaaaagtagctattgaagaattaaattcctttattaccgacagaataatccaaaaggaaggggttggaaagttgactgtatatataaaggtataaactcttggaacacagaattaagagccacaacaagattattgctgttgtaactcaagtatgatttcatcagtgatgtaggcatcactcaacgttataagcggatattgtttattaagaagcaatgcatataccttactattatagaacaagtgcaatgctttttcgggagaaatattcaaacgctccgctaattgcatcaccacacgagtgtatttattccatactaatacatctatcataaacgcagtttattttattgttacatattctttgaaagagagacactcgtcaatgagacgttgattgagaatcctttaccaaagtcgaggttttcgcgtccgacaccgaccaaaggatactctacggcctgcgtactaccatgatagaccttcatacagattctcctttttctttataatgggcttcccagttttcaagaacttctaccaacgtatcggctatgtactcacgactctgggtgtgaagcatgtcatatccacttatcaggtattgacggataagattcagtttttccaaacggttatagagagtaggagccggaatacccaacttctgggcggcactctcaatggcaaaaatcacaaactccatgactttgccatcaacaacgggggctgattggcttgaatgtagcatactatacctctattatcttagtgtaatatgtacaaatatagtgtttattcttgcaacgttcatcgtttttcggcatattttatgattatcaagaacatttgagtatcgtgaaactgattgaaatactccctatttggaaatggctattaaagtagaacatctaagaatctataaatcagaatcatacaaacaaaataaataaaagtgaatcaaagtacgtacatctaggatcgttaaagcacctccccggaaagtgcccatagtatctttgcatcgtgatcacaaagagaattgataagtaaagtaactaattaaaaaaaaacaaaaaactatggcacttagatacgtcattaaaaaaagaacattcggctttgataaaactaaagctgaaaaatatgtagcacaaaatgtaatcaccaatacgttggatttcagagatttgtgtgaggaaatcactaaagttggaatggttcccagtggagcagtgaaatttgtactcgatgctttgatcgatacattgaatctcaaccttagaaaaggcatctctgttcaattaggagatttcggatgcttccgtccaggtatgaattgcgaaagtcaggatgctgaaaaagatgtagatagcgatacgatacgcagagtgaaaatcattttcactccgggctacaaattcaaagagatgctaagtaaagtcagtgttcaaaaagcggtggcttccgatgatggttccatcagcccggagcaaccggatcccaacccgaatccaaacccggatgacggcaaaggagaagcaccggacccggcagcataagactaatcatcagcctttaaaagcaggaaaacagtacccgcctacgggcggatactgtttcccaaagtattcctgtaaaagacttgacaacgccttttttattttgtatctttacaacatcttaaaacattaaaatatcaacatgaaagaattgccatcagaagaggaagaaattccgtttcgcattaaaacttataagaaaaaggaattggcttgtatgtacaatccgaacattacaccccgttgcgccatacgcatattcaccagatggattaaaataaataaagaactgctccggttattgactgccacaggttatcatccgcgtacacgaacttttactccccgacaggtacaaatcatcaccagtattctggacattccataaggatgtccagaatactggttttatcattgcagttgtcccgccgctttcaaataagccacataattcacatacaattggaaatgggcatccactttcgtctgataagcctgctgccaaagcacttgtgcttccagataatccgaaagagtttccagtcccacttcatattgcttaccactgactttcatattctcctctgcctgttccagcgaacgttcggaaagctc

SEQ ID NO: 8249 - DNA, 471 bp, Unknown
  gut microbiota DNA sequence
aactcgcaactgaaagagatgaaccatacgctttcggaagccaattatatcaaggaggaatatatcggccgatatatggaccaatgctccacttatctcgacaagatggatttataccgtcgttccctaaataaaattgctgctgccggaagagtggaagaactatataaagccattaaatcttctcaattccttgacgaagaactgaaagagttttatgcaaacttcgacatgactttcctgcaactcttccccaattttgtggaggaatttaatgcgctgctcacagaacccatgcaacccaaaccgggagaactgttgaacaccgaactccgtatctttgcccttatccggctggggattacggacagtaccaagatagcgcaattcctccgttattccgtgactaccatttataattaccggacccgtgtccgtaacaaagctttgggagaaagagatgaatttgag

SEQ ID NO: 8250 - DNA, 1468 bp, Unknown
  gut microbiota DNA sequence
tgtatctttagcagataatcttttcctgaataggagatttgccgcaattcatccaagtctgcgttcacaccgtcctgaatcactccacctttatttatcagtaaaggaggatcatttttaatctctttggcaatccggtcacgaatagaaatacaaagattcaactgttcgccaatgcgattcaagctcgcattatcagcttccatacatgcctgttttatcggctcaattgcttgcaaggcaactttcaactgaacgacttcacgaggcgacacacgccctacagccactttggaaataatacgttccaggtcacctatcagatgcaactgttcttcaatcaattccttaaaatctggttggcggaagaaatattccactacgttcaagcgttcattaatcggcttctcatccttcaacggaaaaaccatccaacgtttcaacagacgcgctcccatcgggctgatcgttctgtcgatcacattgattagactactgcctccatcattcatattgccaatcagctcaaggctacgcaccgtgaacttatccagacggacgtatttatcttcttcaatacgtgccaatgaagtgatgtgaccaatctgcgtatgctgcgtcattgtcagatactgcaggatagcaccggaagcaatgataccgtttttcaagtgctccactccgaaacctttcagattcttcgtttcaaagtgtttcagcagtttctcacgggcagtcgtttctgtaaatacccagtcgtccagctcgaatgtaaagaacttgttaccgaaattaccttcaaacatcaggcgtttgccacgttcaaaaagaatttccttaggggcaaagttattcaacagtttgtctatataatcaaaaggtccttctgcagtaaggaattcaccggtagaaatatcgagaaaagcaactccacaggaagcctttccgaaatgaacggcagccaggaagttattctctttatagttcagaacattatcattgatagaaacaccaggagtaaccaattcggtaataccacgcttcaccagcttcttcgtcattttggggtcttcgagctggtcgcagatagcgacacgttttccagcgcgaaccagtttcggaaggtaggtatcaagggcatgatgaggaaaacctgccatctcgatagtttttcctttcccattggcacgttttgtcagtgtgatccctaaaatttcggctgcaacgatggcatccgtagaatatgtttcataaaagtcaccgcaacgaaacagcatcactgcatccggatgttttgccttcaaatccagaaactgtttcatcatcggggtgaggacgatctcttcttcgttcacgggtgtctccttttcttttttattgagtgcataatgtgattatccttgcaaagataacggtttttcggcagagaatcaacggtatgctccgattcaattttcaaaattaatgt

SEQ ID NO: 8251 - DNA, 5336 bp, Unknown
  gut microbiota DNA sequence
atatgaaatatttcattgcttattataataatgtacaggtgccaagattgattccatagcacctgtacatattgaaaattctacttaatatcccggattttgatactcgctgccattggtgattgttgcagtaaatgtagttgaaatgggacgtaatgcataattcgggtgaaagaattgtgctaagtccggatgagtattctccagatactccgagttcttaaacattcctgtccgtttcaagtcgtagaagcggcaatattctccgcaaagttcacggcctctttcgtctaagatatcccgcaccgtaacacttcctgtaagcggatttgctccggcacgttcacgaactttgttgatataaccggctgcattcgcaccaccattcaggtaaatatcagcttctgccgcaatcaaataaacttctgccatgcgcatgataaacgttgcattcagattaccgtttctctgtttggaagcattggctacataataattactgctgttatgcttattcagtgacggataatagtagcggaactggttctcgtttgtgccgtcatccttgtaattgcctgtgacgtttgtataagcataattcatgttcacgttattattgtcattactatatacatggtgataatcaatcagcaagtaatcagaaatatgttctttttgcttttctgtagtataatcgatgtcctgtggcatgataaacttaatggctaagtcacctttattcagagctttgccaatgacggtttcttctttatcatacatgtgtacggcactttcatcccacgtgtaattcttgttcgcgttccactctgtagtgaacgattcatgaaatctggggtccaatgttccgtctttctgtacatacaaactcaacaaatgctgagtgggcataaagataccggtaattgagccttcccaagtaaggcgtgtttcctgattatcttcacgagcaccgaacttattgatattgcataagaaatactcatcgttgcgatttagcttgtaatttccgttgcttgatccgtgaccgtctgctcctgcataccagcgatgtttccagagagcttctttgttttcccagttattgctctctttgaatacttcgctataagatgggtacatatacgtattgtatttcccaccgccagtttcgcaatcggtaatcaattttttggctgtatccagagcttcctgcaaatattcggtgcttccatattcgtacgtctgtaagcaggctttagccagaaaaccgagagcggctttcttcgtcggggtggtagtagttgcatgcgtacctgttggcaaccattcggatgcgaatcttaaatcgggcaggattacttcctgatagatagtcatcggatcggtacgggtgggggagtaagtcagtgtttccgctgttatcggttctgtgagcattgtcactgctccgaattgttccactgcattgaaataatagacagctctaagaaaacgggcttccgcaatcttggcattccgctcctcttccgtggtgtaaggaggtttgtctcctaatgcgatagcttcgttacaggctcccacaccgtcgtacgtcccgttccaccaattattggtgtaagtcgtattgggtgatgttcctgcgaaaaaccagaaccactgtgtgtaacttgttgattcgttggctttatacgtccaaagatcggtgtcgccttcagtcagtgacatccagtccgcagaaccgtagtaaaacctttccatagcaaaataacactggttaatcagggtttcatatccatcgatggaagtagccaaagcctctttggtaaatgcgcccgggttgtattcctccaaggtgcaggaatgtagagataaggccgagaacagcacactgcaaaatatgaattttatatatatccttttcatgattataatcttttgttagaatgtcaaattaacgccaaaaacaaattgccggtaggtaggaaatgcatccgaaccgttggtttcgggatcagtatctttcaactgcttatcttttacaaagatgaacggattgtaggctgtggcataaatacggcatttctccattaaaactttgcgggaaatattgacgggtagtgtatatcccagcgtgatattcttaatcttaatgaaggagccgttgcgcactcttaatgaaggatatacggttttttgttcgtctcccgttccgggacgggggaaataggctccttgattatcctctgtccagtagtctacgcctgccagttgattcttggttacgctctgttcggcggtataataaccgagcaggtcactgttgattgtctgtccgtaacgcgccatggcaaagacggataaatcaaaattcttgtaggtgaaggaattgctgaatccgatgatccagtccggattggaatgtcctagaatttgccggtcttccgtactgtatttatgcacacctccatcgcctttctggtctaaggtttctatcttgatgaatccgggttttacgccgtaggcatccaatgtttcctgtggagtatcggttccccaaattccggtatatttatatccgtaaatagctttaatcggttcaccaacaaacaggttttcggcgatcagatcaccgtcaggcagatcgtctatttgttccttgttccaggtgacggataaagtggtgttccatgtgaaatctttatgccgtatgttgtgcgaagtgatcgttgcttccacaccttggttactggtctgggcgatgttctgccagatagccagaggcgatccccatccggtcagaccgctggtgatgggcaatgtacgtttgaataataatcctttggtggttgtcttgaaccattctaccgatccgtcaatgcgaccgttcaggataccgaaatccaaccccacattccagttgtatgacttctcccagccgagatcggaactaccgtaggtaccggagtattgcgtgaaaggaacaatcttcccattaatggaaattcccgaagcggtatatacgtatgcttgtgttgtggtgctgtatgcggtggttcctcccgagttacctgtgataccgtagctcactctcaatttcaggttgtccagccaactacgtgtcttttccataaatgcttcgtccgatattctccacgccagtgcgcctgcggggaaagcatcccatttatgtccggtggagaattgtgaaacaccgtcccaccgcgtagagaaattaaacaggtatttgcctttgtatgaatagttcagacggaaggcaaaagacattttctgcgtctgtgcgaagtcggattctacatgttgggaagtgcccgatgtcagtcgccagaaagaccattgatctaccatttgaccgctggcggcagccatgctactttccgactggttcttattccaggaagtaatcaatgaacctcccagattatggtctttggcgatggttgtgttgtatgtgagaatattttcccaagtgtaattccaggcattgttgttggtgatggaagcatgcggtgaacctgcataagacggacggttggcattgcacttctctccccagtattgcccgcggcgtgagtgattcaacgtaccattgacacgactggtaaaagtcaggtctttgacgggagttagttcgacatagccgctcatgttcagataggtggaacgtgtgttgtctacatactggttctctataaaatcactcatcggggaatattgtcccgtgatgtattcgtgattgatctcccctttttcggtataagcatcacccaacgggatggcggagagagatttggtgaatgtgttttttacgccggagttcaagtcccggtagactaaattggaggtaaagcccacctttgcccatgaaaatatctgttgatccaggttgaggcgtaacgaatatctgttcagattttcgttattaagtaaaccctcttcccggttgtaggaagtcgaagcaaataattttgtcttttcagtgccactgctgaccgaaagactgtatttctgtgtggtagccgtgttgcccgacacttcatctatccagtctatccatttgccgtcgttgtatgcatctataaaatcctgtttccccagtagggcggacatatcggtaggatagtcaccgtttttatatttataggcttcttgctggtaggtgacccattcatcccgcgtcatcccatgtctgtagttgggtgaaccgctgaatccgtaataagcatcgaaatttacggtcgcttttccctcttttcctcttttggtagtgatgattacaacgccgtttgctcctgcggaaccataaatggcggtggaagaagcatctttcaacacatctacactcttgatgtctgacgggctgacctggctataactgccggggattccatcgataataaacaatggttcgttgctgccataaatagatcgtgaaccacgtaacaggatagtgacatcacctcctacctgtcccgaagttttggtgatatccattccgggtattttgccttgaagggcttccatcacattattggtaggagcggccagtacttctgcacttttgacggaggttaccgcccccgtcaaatcccgttttttgaccgatccgtatcctaccaccactacttcatcaatcagtctggcatcttccgtcagtatgatttccagcttgttcttgttgcgtgtattgacttcctgctccgtgtatcccatataagatacctttaatactgcattgggcgatacgcgcagtgtgaacagtccgtctacattcgtaattgtcccgttgctggtacctttttcaacgatatttgctccgataatcgtctctccttgagagtttttcactatacccgagatcgttctgttctgttggcaataagcccgtgttgatccaagtatcgataatgaacctattaataggaataataggtaaaaattcattctataaacagtctttaggggattattctcccctatgtttgttttatcagaaaatgatttcatgctttttgtttaattgtatgtttactaatttgtttttggatagctaaattccaggatgatttaaagctatgtttcgattgtaatgactttacttaccccataggctattagattttattggttaaatgatgattgttcagaatgtcaatgccaattgaacattattctgttactgttttgaatgtggcgccacgattcatgtcagtaaaaaaactgacagggcaaaattatgcatatagaactggggattgaaaaaaataaagttgacttttatcaggacagagttgtttcttactacctgttgtatattt

SEQ ID NO: 8252 - DNA, 12001 bp, Unknown
  gut microbiota DNA sequence
gtttgttgggtactgttgttcttattatttgcaaattctcttctttttatctagctttggaaatgaaataaataaagtctaaacgatgaaagattataaagtagataaggcaagcctttccgcatccttttgtcaagaggtgtatcaggttgttcgggaaattccggtaggtaaagtttctacctatgggggaattgccgcattattgggaatgcctcaatgttcccgtatggtggggcgtgctttgaaacagattccggatgatttatctgcgccttgtcaccgggttgtcaatgcatcgggacgccttgttccgggttggacagagcagaaacaactcttgttggaagaagggatctctttcaagcaaaatggatgcgtagacttgaaaaagcatctttggaattactccgtacctgaatgaaatttgcatatttaatctattttccttacctttgtgccaacaatatgcaagaacagactgttatttatttatgaaaatactgttttctactgttcattgagaggataatcttatcaaattctattccttttaaactacttagtctgttttctttaaccatttaaaaacgtcggatcgtcatgttaccatgtgacatgactgaaccatgcgaacattcaacttgtttatcgtaagtgagaatgaggaacgcggcagttgaaaacaaaacaaatattataatctaaaccaatatattatatgagtaaaatagaaataaaggatttgtaccttatctttggtcacgagaagcagaaagcactcaagatgttgaaaaaagataagagtaaagaggaaattctgaaagataccggttgtacggtaggagtgaaagatgccaatctttcaattaatgaaggagagttttttgtgataatgggactctcgggaagtggaaaatcgacattactgcgttgtatcaatcgtctgatacgtcctactgccggacaagtgcttgtaaacggagtagatatatctaaaatatccgaaaaagagttattgcaggttcgccggaaagaactggcgatggttttccagaatttcggtctgttacctcaccgttccgtattgagcaatatcgcgttcggcctcgaacttcaaggagtgaagaaagaggaacgtgagaagaaagcgatggaaagtatgatgcttgtcggattgaaaggatatgaaaatcagatggtgggcgagctttccggtggaatgcaacagcgtgtcggactggcccgcgctctggctaataatcctgaagtacttctaatggatgaggctttctctgcgctcgatcctctgattcgtgtgcaaatgcaggatgaactgttggctttgcaatcgaagatgaaaaaaacaattgtctttattacccatgacttgagtgaagcgattaaactgggcgaccgtattgccattatgaaagacggagaggtggtgcaggtaggtacttcagaagaaatactgaccgaaccggctaacgattatgtagcccgttttgttgaaaacgtggacaggagtaaaattattaccgcttcttctttaatgattgacaaaccactggtggcccgtctgaagaaagagggacctgaagtattgattcgtaagatgcgtgcgaagaatatcaccgtattacctgtcatagacgccgatgataaactggtcggagaagtacgtctgaacgacctgcttaagttacgtagcagacaggaaaaatccattgaaacgattgtgcgtaccgaagtacattctgtattggaggatacagtgttggaggatatacttcctttaatgacaaagagcaattcgccggtatgggtgattgatgagacgcatgagtttttaggaacaatcccgctttcctccttaatcatcgaagtgacggggaaagataaagaagaaataaacgaaataattcaaaacgcaatagacttatgataaatataggacaatatatagagatggctatcaattggatgatggtacatttttccactttctttgatgccataaatgcaggcatcggtagttttattataggattccaacacgtactttttggaatacctttttatataaccattctagtgcttgctgcactcgcatggatgaaggcaggacgtggtacggcaattttcaccgcattgggattattactgatttatggaatgggattttgggaggctactatgcaaaccctggctctcgttttttcatctacctgtctggctctgattgttggtgtacctttaggagtgtggacggcaaacagtccgcgtgcagagaaaatactccgtcctgttctcgacttgatgcagacgatgcctgcttttgtttatctgattcctgccgttttatttttcggattgggagcagtgccgggagtgtttgccaccattatctttgctatgcctcctgtggtccgccttaccggattgggaattcggcaagttcctaaaaatgtagtggaagcttcccgttcgttcggggctacccgttggcagttattgtataaagtgcagcttcctttggcgttgccaaccatcctgacaggtgtcaatcagacaataatgatgtcgctttctatggttgtcattgctgccatgattgctgccggtggtctgggagaaattgtattgaaaggtattacccaaatgaaaatcggacttgggtttgaaggtggtatcgcagttgttattttagctatcatcttagaccgtatcacacaaggaatggcaggacgaaaaaataagaactaaacggaaaggataaaatacgtatgagaatatataaaatagtaggaatagtattgtcagctatgcttttgctagcttcctgtactaattcagacttagagaaaaagaaagtaaaaatagcctatgccaattggctggaaggtattgccatgagtcatttggctaaggtggtattggaagaacatggatatgaggttgaactgcaaaatgctgaccttgcccccatctttgtatctatgtcaggaaagaaatctgatgtctttttggatgcctggttaccaataacgatgaaagattatatggatcagtatggagacagcatcgaatttctgggtgaggtatatggagaagcccgtgtaggactggttgttcctcaatatgttacgatccagtctattagtgagctggaagctaataaagaccgcttctcttctgaaatagtaggaattgatgcgggagcagggataatgaagacgaccgataaggccattgctgcttatggacttgatggctataccctcatgacttcaagtagttccactatgctggcttctttgaaaaaagcgatggacaaaggagaatggattgtcatcacggggtggacaccgcattggatgttcgaccagtttgagttgaaattcttggatgatccgaagaaagtatatggagacttggaagaaatacatgctattgcatggaaaggattcagtgagaaagatccgtttgctgccgaattctttggcaacatcaaactaatgacagaagaacttagctcttttatgacagctatgaaggatgcccggatggatgaagaagaaatagcccgcaaatggagggatgaacatcggcagttggtggatagttggattccgaagtcagagaataaatagattggagcattgttattcttaattttaaatataaaatagacatgaactctagtgggaaaaagggagtattgtttatgttagacagagttcatacaataaaaaaaacggtaatcttctacaagattaccgttttatatttatagggtattactattattcagcaccccagttttctctagccaaacgtttgtagctgttgtaacgccatttagcgttttcttcagcagctttgaacagttcttcagcttcagtaggatattgtttcattacagaagcgtaacgaacttcacccttcaagaaaccttggaaatcttcccagttcggttctttgctatccaattggaatgggttcttgccttcttcttccaaagccgggttgtaacgccacaagtgccagtaaccgcacttaacagctttttcttcttcttcctggctcttacccatacctgctttcagaccgtggttgatacacggagcataagcgataatcaaagatggtcccggatatgcttcagcttcacggatagctttcagagtttgagcttggtcagcacccatagcgatctgtgcaacatatacataaccgtaagtagtagccatcagaccgaggtctttcttacgtacgcgcttaccagcagcagcgaacttagcgatagcacctaccggagtagctttagaagactgaccacctgtgttagagtaaacttcagtatccagaacgaggatgttaacgtccttaccggaagcgattacatggtcaagaccaccgtaaccgatatcgtaagaagcaccgtcaccaccaatgatccactggctgcgttttacaagatattgttgcagttcagcgatttgtttgcagtggttacatttatccttgttagcttcaacaaccggaatgatcttagcagccaattccttagtcttgtccgcatccagcatattgttgatccattcagcgaacagttctttcacttcagcaggagtgcaatcagcagcaatagcctcgttcatcactttcacgagacgagcacgcatcttttcgttagccagttccatacccaaaccgaattcacagaagtcttcgaacagtgagttagcccaagcaggaccgtgtccgttttcgtttgtagtatacggagtagaaggaacagaaccagagtagatagaagaacatccggtagcgttagcaaccatttcacggtcaccgaacaattgagaaatcaatttcacgtatggagtttcaccacaaccagagcaagcgccggagaactcaaacaacggagtagcgaactgtgagttcttcacgttagccttgatatcaacaagatgttgtttagtcttcacgttttcagcacagtaagtccagttttcagcttgagccaattggctttcgaggtgtttcattgtcaatgctttgccacccttcttcggattacccggacagatgtcggcacagttaccgcaacccagacagtcgagaacgtccacctggatacggaatgtcataccgtcgaatgctttacctacagctttcagttgttcgaacttagcacccttctgctcttcagcgtcgagtacgaacggacggatagaagcgtgaggacaaacgtatgcacacttgttacactggatacagttttccggattccattcaggaacgaatgcagctacaccacgtttttcgtatttagcagtaccttgataccaagtaccgtcttcgatacccttgaatgcagataccggcaacaagtcaccgtcttgtgcattgatcggacgaactacttcgttgatgaatgcaggatcgttgttttcagcttttgcgtcatccggaaggttagcccaagcaggatcaacagccaaagtcttgtattcaccaccacggtcaacggcagcatagttcttgttaacaacgtcttcacccttcttgccgtaagacttaacgatgaatttcttcatctgctcaacagcttgttctacaggaataacgcctgtgatacggaagaatgcagattgaaggattgtgttggtacggttacccaaaccaatttccagtgcaatctgtgttgcgttgatatagtatacagaaatgttgttctgtgcgaaatatttcttaaccttgttaggcaggttcttagccagttcttcaccttcccaaattgtgtttaataagaaagaaccgttcttacgcaaaccacgagttacatcgtacatgtgcaggtaagcctgaacgtgacaagcaacgaagttcggagtatttaccagataagtagaacggattggattgtcaccgaaacgcaagtgagaacaagtgaaaccgcccgacttcttagagtcataagagaagtaagcctggcagtgtttgtcagtgttgtcaccgataatctttacagagttcttgttagcacctactgtaccgtcagcacccaaaccgtagaatttagcttcgaacataccttcgccgcctaaagcgatttcttctttttgaggaagagaagtgaaagtaacgtcgtctacgataccgatagtgaagtggttcttcggcattggcatagccaagttttcgaatactgaaaggatttgagcaggagtagtatcttttgaacccaaaccgtagcgaccgccaacgataaccggagcattttctgcaccgtagaagcagtctttaacgtcaaggtaaagaggttcgccgttagcacccggttctttagtacggtcaagaactgcgatagttttagcagtcttaggtacagcagccaagaagtgtttagcagagaacggacgatataggtgtacggcaaccatacccactttttcgccgtttgctaccaggtagtcgatagcttcgcgggcagcttctgttacagaacccatagcgataattacgcgttctgcatcttctgcaccatagtaatcgaacaaaccgtatttacgacctgtgatcttagaaatttcattcatgtattcttctacgatagcaggaactgcttcatagtagttgttgcatgattcacgatgttggaagaaatggtcaggattttcagccataccacgagctaccggtttcatcgggttcagtgcgcgggcacggaattcagccaaagcttcctggtcgatcagcggagcaagatcatcattttccaacatttcaatcttttggatttcgtgagatgtacggaaaccatcgaagaagttcatgaacggaacgcgagatttgatggtagccaagtgagcaacaccagccaaatccataacttcctgtacagagccttcagccaacatagcaaagccagtctgacgagctgacattacgtcttggtggtcaccgaagatacacaatgcgtgagaagccaatgtacgagcagatacatggaatacgcaaggcaagaactcaccggcaattttgtacatgttagggatcatcaggagaagaccctgggaagcagtgtaagtagtagtcaacgcaccagcctgaagagaaccgtgaactgcaccggcagcaccaccttcagattgcatttcctgtactaatactgtttcgccgaagatgttcttacgtcctgcggcagcccattcgtctacgtactcagccatagtcgaagaaggagtgatggggtagatagctgctacttcagagaacatatacgagatatgcgctgcagcttggttaccatcacaagtgatgaatttcttctgtttagtcataactaaattaaatatttaagtaaataaatcttttaatataaaaagccgaacatccagagaggtatctggttgccccgacctatttcagccttatgcaacgcgtacgttacattcggattgttcttgatctttgcgccttcctggcaaattttgaacggcattacttcgtctaccataaaagagacgtttttatctcctttatgtaccttatggtctttccataaagaatttgcaaagaatgtgtcgagcacatcctgctcttccactttcaccggatagatggaatacatcaggttggagttgtgcatcattatctttgaaggttttttagggaattcttcccctttcggataaaccagattaatgagtcgcgcatctgccagatacttgatatagttcatcaccgtggcgcgagatgtctgtatgtcgcttgccagttggcttacatttggagctttcggcccgtcgacagcgagcaaatatagcaatttttttatctttgaaagatatttcagttcaatttgtttgatgagaagtatatctacttccaccatcatgttcatcgttttcagcagattctccgaaaagttacgtttttcaaggaagaacggatagaatccgtggtgcagataatcctgaaaataatccaacggacggactttggagagtactcctttggcaatctgttcgtgagtgctaagaatttcttcgaggctatatgccctgaatttcatgcctgtttgcaagtttaggaattcacggaaagagaatccacgcaggttatagctcttggcgatatcacgtaattcaagattttcttctttcagtcgcatcacggacgagccggtgaagacaattttcaggttaggaaaacggtcgtaacacatgcgtaactctttgctccattccggatgtttgaacacctggtcgatcaacaatacttttccgccacgtttctgaaattcgttggcgaagtctacaatgctgtggcccgagaaatagaagttgttcatgttgatgaacagacaggaacggtcattcccgaatttctctttggcgtattggagaaggaaagtggtttttcctacgccacgtgtccctttgataccaatcaggcggtcgctccagtcgatctcgtccataagatcgcggcgaacgggggcattggtgtgctcaacgaggtaggcgtgtgtgcggtagaatgattccatttcagttctttgtttttcgggtggcaaatatactgctttttttaggatttgcaaagtagagatggcaaaattgtgtgtttaattccaactttctgtttattgtagtcattcctgactatttcctgtatatatttgcagaataaagtgttgaattcatttgaaatgacaaaaagggctctttatatattcaatccggaacatgacttggcgttggccagcggtgaaactaattatatggctccggcttcggccagacgtatggcttccgagttggctttgcttccgatgtggtatgcagaggaggggagtgctgtattagctccttccgcttataatctggattatttgaagcaaatgcaggaattgctgggagtttcgattcatttgatgactgaaccggaacttgctgtcggaccggatttggatattcgtccttggggatgggatttagctttgcggaagcggctttcagggctgggcgtggatgaagccctgcttccttctatggagcaattaaacggtttgcgggaatactcccatcgttctaaagccgtctcattgcttccggaattacaactgaatgaatatttctgcggagaatcttattatttgaagacacaggaagaatggaaaacctttgtggaagagcgggaatgctgcctgttgaaagctccgctttcgggaagcggtaaaggcttgaactggtgtaaaggcatatttactccttttatttccggttggtgtacgcgtgtggctgcttcgcagggtggaatcattgcggaacctatatataataaggtagaggattttgccatggagttttattccgatggtacaggtgaagtgacatttatgggatattccctcttccataccggaaagagtggaatgtatgaagggaatcgtttgttttctaatgaggcaatctggaaacaactttcgcaatatgtcccttcaaaggttctgacggatttggaaaactgtttgaaatacagactttctgcgttggtaggaaccgtttataaaggttatcttggagttgatatgatgatttgtcggtttccggaaaatgaaaagccgttttttcggattcatccctgtgtggaaattaatctgcgcatgaatatgggagttgttgcgcgttttttatatgaccgttatgtacgttctgattcaacagggcgttttgtgattgattatcatccttcggaaggtgaagccttgcaggaacatgaacgaatgtccgcaacttatccgttggaaatcagggaaggtagagtgtactccggttatttacctttggttcatgttcataggagaagttgttatcgggcgtggatatgggtaactcctgataatatttaactttatctgttcacaccagccagcgactgatattgcgtttttccgcactgaactctaccccgatctttatcacttcacgtccgtctgcctgatacggtatcagatagcctttatcgtcgatctgcttcaatgccgcttctgctgtgtcatgcagcttgaattcgaagacatagatatatttaggtgttttcactacggcatctgcacgaccgcgggcgctgcgtacttcggcatcggtgaactgtcccataagtttgaaaacaatatagaaaactacttggtagtgacgctctgtctgctcgttcaattcgtagttgaaatcggcaaagaaggcttgcagacgggtaagaaaggcatcgtagtctccactctccaattcattgacgaacttgccgatgtaaaacccttgatcattattcttcactccagtatagaacggtaccaggaaatccatgaaaccgtaacgcacctcatcgttgggaaattccaacaggtagttgcggaaacgttcatcataagcttttatcgtcagatatccactttggtaaatcaacggaatcgggttattggaatctacacgatattcggagaacatggaagacggtgcttcgatcccgtcaagcaaagtacgcaggtcgtattcggtttcttgcagcatctcgacaaggaaagtcggtgtgccggtctggaaccagtaattgtcgaacacttttgatttcaggacattcagtacactgaacgggttgaagatacctactgaattaatgcaaaaatgatagccatcgtagagacgtgtcattcgttgtaccgcgtcatcataagaaatggaattattggctgcaagtatcttgatttccggctggaaggtatccaataattcttgaagagtgatgccgcaaagggttccgtaatcgggccataaagtgatgtcctgcaactggttaaggtcactgaatacacttacttgtgagaatttcgttactcctgtgaggaagacgaaacgtaggtagcggtcggcacttttcaatactccgtaaaaggctttcagagttttacggtattcatccagtaagacatcattgcctaaagcttgcaatagaggtttgtcgtattcgtctaccagaactacgacgctgctaccggtttgttcgtaggcacgacggatgacgccagagaaacgaccggaaagagtgttctcgtctattcctttgccatattggatttcccataaggtgagttgacggctgaggatatcataaagtctttctggggaatcgtacttctcggcatttaaatccagatgcagcacaggatgcttttcccatttcgtttccagtttttcaatggcaagcccttcgaagagttctttctttccttcaaagtaggcttcaaaggtagagagaagaagacttttaccaaaacggcgtggacggctcaggaagtatggagtagatgtataagctattttccatacaagctctgttttatctacatatagataatcgcccttacgaagtttctcaaaggtctgtatcccgatagggagtttacgaagcaggtcattcattgttattttccttttagtggttcaaagataatcattattttcgtaatatttcgttttcaatatctcaaagaacgagcgttataattttgtttaactggaaaattattatttagctcattcttgcacggttttcaccacagaggacacggaggacacagaggtgaatttgttttatgacttacggttgtgaccctaattttaatgcgtaatcctcctctataaagttgaaaaaacatgaaaacatctgccacctgcaaccaaacgcatgtaatacagtagttaataagtagttggagcgttgcagatacctgcgacagataggttgcagataaagtatctgcaacacagtataaaccttacataaactaattctccatgagtgcaaaagtttattgtatacattaacttcccgtttccaggcggggaactgtcgtttcctgcattagaaattacagtttccacggcaggaaacgagagtttctaaggcgggacactacagt

SEQ ID NO: 8253 - DNA, 2023 bp, Unknown
  gut microbiota DNA sequence
cacgtttacaacatttcaatcaaaatctgaaactggataacgcaaagaaagtactctacaaagagattcaacaggcttggtataatgctctagctgcagaaagcaagtacaactccagtgaagtggcagtgaaagctaacgaagagtctttccgcttgatgagtgagaaattcaataatggcaaggctacctttgtagaatataatgaagcaaaacttaatctgactaaatctctctctgataaattacaatctaaatacgagtatctattccggactaaaattctggatttctacaaaggacaagtcattgaataaaaagaaatatatttgagtttagtatagtagttccttcaaacatatccgttggttcattcgttattatagaaagaactaacggatatgaagtattttatcatcatagtgatcgtagtgattagtaatacatttttaggagttgctaaaccaatgaaaaatcaagcagaaatctattttgcaggaggatgcttctggggaacagaacatttcctgaaacaaattcgaggagtagaaagtactcaagtaggatatgccaacagtaatgttgccaacccaagttatgaacaggtctgttcaggaaaaaccaatgctgcggaaacagtaaaggtggtttatgatcctaaaacggtagatttaaatttgctgctcgatctgtatttcaagacaattgatcctaccagcctcaaccgtcagggtaatgaccggggaacacagtatagaaccggaatttattatataaataaagaagatcttcctgtcattaaccaggctattaaactattgtctacacaatataagactcctatcgctatagaagtaaagccattgactaatttctatccggcagagacttaccatcaggactatctggataaaaatccgggaggatactgccatatcaatcctgctttatttgaaatggcacgcaaagccaatgcaccgaaaacaaaagtgtatcaaaaaccggatgactcaaccctccgcaaggaactgtcggcggaacaatatgcagtaacccagaagaatgccaccgaaccggccttccacaatgaatactggaatgagcatcgcccaggcatttatgttgatattaccaccggagagcctttgtttgtttctaccgacaagttcgattcgggttgcgggtggcctagcttttcccagccgattcaaaaagatatcatcgcagagaagaaagatacttcgcatggcatgatacgtacggaagtacgcagtaaaaccggagatgcacatctgggacatgtattcacagatggtccgaaagagaaaggcggattacgctattgcatcaatagcgcctcccttcgttttatcccgaaagagaaaatgaaagaggaaggttatggagaatatttgccgctcgttaaataggcaccgcaccggaaagtaatacaaatcaatataagctgtttatcagataaacagaacggtggacttcctcatagggcaatccaccgtttttaatgcagttaaattaagagagagaaggagtttcacaactcctaatttatttttatctgctggcagtcaacagagttgcttcattcgttgccggagtagccacgttcatagcccagttcacactagattcttcaatccatttatcattccatttatagttcatataagctaccggcatattagcgtcgttcaattcgtacacgctcttttcaacagccgcatcgtaagctctgtgagaatcattccaacgtgcgtataccaaagtgatttcattagaagaataagtataatcaatcttgaagtacggcagccatttgtcagtggaagcatcccatttgaaagcctctttggtagccattctcttttgatcgtcataggtaaaatcatatttcatgtggcgataaagagagccatctaatctgtaaatcaccttcgatactacaagatcacctactgtttcttcattagtaatgaagttattgttttgtgccttcactgttgca

SEQ ID NO: 8254 - DNA, 18983 bp, Unknown
  gut microbiota DNA sequence
acaacattcactaacttacatagaagccgaacaactgattaacagcggagtacacctgctctacgcagattgtattacccttgcggcacgctctaatatagttatccgcctaacagatacacacgatctgttaacagaacgcctctatatatcttcccatgacacaggcaacagtgtcaaagccatcctctcacaggattcggctacctttgtacgttttacctcattgaatgtattgcccggatatttgtttatgggtaagatattggaagttatcaacaaatatcaaatcaatgtcatctcaatggcctcatccaatgtatctatctcgatgatgctgacggccagccgggacaccctgcgaatcattgaaagggaactacacaaatatgccgaaatggttatggacgaaaatatgtctgtaatacatatcatcggctcacactatctgtgcacagcacagataaaaacaaactaatcagttcgctatccaaacaatttctcgaaagccagtgtgtggcctgattaaaatgtatattcagattttatattcctctatcttccgatacaacgtagtaagtccgattttcaacaagcgggcagcttccgttttattccctttcgtatattccaacacacgcgcaatatgcctgcgctccattgcagccagttcaaaactacctgtactatcgtccgaacattcataatgagtgttctggatttccaaaggaaggtcgcagatatccagccgtccaccttcgcaaacaatcaggctacgctcaatcacatttctcaactcacggatattccctttccacggctgttgttccagcgcttccaaaaaagcaggagtcatctcattgatggcatacgaaagtttttcggagaaacttttggcaaaagcagttgcaagaattctgatatcaccggtacgttcacgaagcgaaggaagatgcacctgaaaaaccgaaagacgataaaacaagtcttcacggaaatgcccggctttgatctcctcctgcaaattccggttggtagcagcgatgatacgcacattgactcttgtcggcttggtatcaccgatctttatatattctcctgtttcgaggatacgcagtaactttgcctgcagttcgaaagccatctccccgatttcatccagaaagatcgttccgttattggcctcttcaaaaagccctttcttatctttcaacgcaccggtaaacgagccagccttatgtccgaacatctcgctttcgagcaattctttgctgaaagacgaacagttgaccgccacaaaattctgtttgctccgcttgctgttataatgtatagcctgcgcaaagacctcctttcctgttccggtttctcccgtcagcaatacgggaacatctgtcacagacaccttctgcgccaaagacaccgactctttcagcacttttgactcccccaggatagaatcgaacgagtacatttgcccgaccttcttttccagtttttcgagacggacattcatttttgctttctctacggcacgactaatgagagggataatcttgttattatcatctcctttcgttatataatcaaacgcaccgtttttgatagcctgcaccccgtcgggaatattgccgtgagcagtaagaagaatcacttctacattgggagctatttttttgatattcaaaactagatccactccgtttccatcaggaagaaaaacatcgcataaagctacgtcgggcgattgaatttccagttgtttgatggcagctttgcaatcacctgcctgacacacttcatagccctcaagttccagcatacgagctaaaaggctgcgaatctggacttcatcgtcaataataagaattttattcatacaatttgtctacattaaatagaagaatgaaaaacagggtgcgcaaatatagtttttttatctgaatccatgaacatttcttcgatcctgtttgttatttccataggaaactatttacactataaacagatgaaaataattattattgggggagttgcaggaggagccaccactgctgcccgaatcagacgagtagatgaaacagcagaaattatccttttggaaaaaggaaagtatatatcatacgccaattgcgggcttccttattatataggaggagtgatagaggaacgggataaattgttcgtgcaaacgcccgaagccttctctacacgcttccgtgtagatgtacgtacagaaaacgaagcgattttcattgaccggaaaagaaagacagtgaccatccggcaaagcagtgaagacacttatgaggagagctacgataaattagtcatctccaccggagcttccccggtgcgtcctcctcttccaggaatcgaccttagcggaatcttcacgttaaggaatgtcaccgacacggatcggatcaaagaatatatcaagagccacgctccgcgaaaagccgttatcgtaggagccggatttatcggtctggaaatggcggaaaacttacatacacagggagcgaaagtgtcgattgtggaaatgggcaatcaagtgatggctcctatcgacttctcgatggcatcgctcgtccaccagcacttgatggataaaggagtcaatctttatctggaacaagctgtcgcctcttttagccgggagggaaaagggttgaaagtaacgttcaaaaacggtcagtccatttctgccgatatcgttatcctgtcaatcggagtacgcccagaaaccagtctggcacgagctgccgaactgactatcggccctgcaggaggtattgccgtgaatgattacctgcaaacgtctgatgaatcgatttatgccatcggtgacgcaatcgagttccgccatccgatcaccggaaaaccctggctcaactatcttgccggacctgccaaccgtcagggacgcatcgttgcagacaacgttctcggggcaaaaataccttacgagggttctatcggcacttcaatcgcaaaagttttcgacatgaccgttgcttcaaccggtttacccggcaagcgcctgcgccaggaagagatagattatatgtcatctaccatccatcccgcctctcatgccggctactatccggatgccatgccgatgagtatcaaaatcactttcgacaaaaagacgggaagattgtacggcgggcaaatcgtcggttacgatggagtggacaaacggattgacgaactcgcgcttgtcatcaaacacgagggaacgatctacgacctgatgaaagtggaacaagcgtatgctcctccgttctcttcggccaaagatccggtagcactggcaggatatgtagcggaagacatcattaccggcaaaaccaatccggtatattggagagagttgcgggacattgaaatggaaaataagttcctcctggatgtccgcaccccggacgaatattctttaggcagcttaccaggtgccgtgaatattccgctggatgagcttcgtgaccggctggccgaactgccgaaagataaaatgatttataccttctgcgctgtcggactacgggggtatcttgcctaccggatattaactcaacatggatttgacaaggtgcgtaatctctcgggaggactgaagacttatcgagccgccactgctccgattatcatacgcgaagaaaatggaaatgaaatagacgaatcacccgaacaacaaggaggtagtccccaagttgggcaacctgcagttgctaaggtttcggataccacggttactgccacggctgccgtcaccgccgatgcccttgcaacccccgctaaaacagttcgggtagacgcctgcgggttacaatgtcccggcccgattttgaaaatgaaaaaaacaatggatacactggcatcaggtgaacgggtggaaatcacctcaaccgatccgggatttccgcgtgacgctgccgcatggtgcagttcaacgggcaatcaactgatttcgaaagacagctccggaggaaaatctgttgttgtcatagaaaaaggagaaccaaaagcgtgcaatattgttacttcatgtgagggcaaaggaaaaacctttatcatgtttagtgatgatttggataaagctttggctacttttgtactagcaaacggcgcagcagctacgggacaaaaagtcaccatcttctttacattctggggactgaacgtcatcaagaagttgcacaaaccggaaaccgaaaaggatattttcggaaaaatgtttggcatgatgctgccttccagctccaaaaaactgaaactttctaagatgagtatgggcggaataggcggaaaaatgatgcggtatatcatgaacaaaaaagggattgattcactggaatccctgcgccagcaagcgctggaaaacggtgtggaatttattgcttgccagatgtcaatggacgtgatgggagtcaaacaagaagaactcctggacgaggtgaccattggcggcgtagcaacgtatatggaacgggcggataacgcaaacgttaatctatttatttaaaaaatgaacaaatgaaatatttaaataaggtatgaaaacaatatgtgcaatgcgtgatgtattcaaagcaatgggaaactttgaaacagcatttgaaaaaatgtaccagataacgcttaatgaagcaatgatattgtgtgcccttaaagaggcttcggacaaagtgacggctaccaacctgtctaaacaaaccgaactaagcccctcacacacatccaaaatgctgcggatactggaagaaaaaggactaatcgtccgatcactcggaagtgaagaccggagacagatgtatttccatctgactcaattaggtaaacaacgggtaactgaactggaacttgataaggtagaaataccggatctactaaaacctctgttttaataaacggatttttcaaataaatatctgtaaataataaacggtgagcaaactccctgataatagggcagagcgctcaccgtttttctttccgccgggccaaagaaatatgttaattttccggcaaaagaaatttccacgcgaacctttttccacctttcttgttgtttgtatcaaaagcccaaggtacctgggcgtgatttttatataacctaaacattataaaagatatgaagaaattaattcctattttattggcggtctttgcactcgcttcatgtgaaaaagacccggacatgggtaaactggatgacaattatctggtatacactaactacgacaagaaagccgatttcaaagttcctacattctatctggcaccacagattctggtcatcagtgatagtaaagaaccggaatatctcgaaggtgaaggcgcagaacaaattctggcagcttatacagacaatatggaagctagaggttacgaagcagcagctgaccaggaaagcgcagatcttggtatccaagtgagctacatcgcaagtacttattatttcaccagctacacacaacctgaatggtggtggggttatcccggatattggggtcctggctactggggtggcaactggggtggtggatggtactacccgtatgcagtaacttatagttatagcaccaactccttcctgacagaaatggtgaacttgaaagccgaacagggagacagtaaaaaactgcctgttgtatggacaagttatctgaccggatttgaaactggttccaaagctatcaaccgtactcttgcagtagaagctgtcaaccagtcatttacacagtcaccttatcttactaacaaataaacaactacaactgttatgaaaacaagaaaaaatatatacttcaaggtagtagccttggcggctattgccatcgccttcgccatgccggctaaggcacagctatcggacaatggatatgcaaatatcgactggcagttcaacgctccgctaagtaacaattttgctgataaagcaagcggttggggtatgaacttcgaaggtggttatttcgtgactcctaacatcggtttgggtcttttcctcaactatcacagcaaccacgaatatgtaggtcgcgaaaccttccagatgggcgccggtgaagtgactaccgatcagcaacataccattttccaattgcctttcggtgctgctgcacgttaccagtggaatcgtggtggagcctttcaaccatacgtcagtgctaaattaggtgctgaatatgctaaaatccgctctaatttcagcatgctggaagcaagagaaaacagttggggattctatgcttctcctgaagtaggtatcaatgtattcccatgggtttacggaccggggttgcactttgctttgtactacagctatggtaccaacaaggctgacgtactgcattacagtgtagatggattgagcaacttcggcttccgcctgggtgtatccttctaagactggctgataactatcagaatattacgttaataataaaaaaggtaaaaggtagcttttaatataggcaccttttacctttctttttttattttttcttcatcgcatcataaatagctccctgtattcgctcacgaatgtgcagttggttcagtttgcgatttgtcacatccggataaatccggttgctaaggaatacataaaccagttcattgaccggatctacccatgcacatgtaccggtaaagccggtatgaccgtacactccggcaggtgcggcaggagcacaatttcctttcttcggatcatcagcatccggtttgtcaaagcccaagccacgccggctgatctttgaagtttccgtagtaaacaactggcaggtttctttgcttagatagcgttgaccgtctatttctcctccattcagcaacatctgataaacgcgggctacatcacgggcagtagagaaaagtccggcattcccggccaatccgccaaagaaagcggaagcctcatcatgcacaaatccctgcaaagtctctttacgcaagaaacggtctttgttggaagggacaatttccgatttggcaaaacggcgtaaaggcaagtagcctgtatgctccaaccccatcggttcgtaaaactcacgttgcagataggcttccataggcataccggccagttgttctaccaacatacccaacagaatgaatccgacatcactatatacatagcgtttctgctttaacggagcttccattattttctcttccatcaccttccggaaggaacggtttaaccacaagctatcgcagatttgaacagtgtaatcaccggtcttgacgggagagacgtattcacttttgaatttgaacttcggattcgcccatgaggtcgttcccaactgtaacggatgatgtgcgtctttgcgtgcgctgaacaatcttccgtcatagctatctttatcaatggcttcttggtagaaaggaatccaggaaggtaaaccggactgatgatacaggatttcctgaatcgttatatctttcttatcagtacgttgcaaaaacggtaaatgatccgaaatcttatctgtcagattgaaacgtcccttatcgtagagtttcatgatggcaagcaaagtgcccgtcgtctttgatagggaagccaaatcgtagatactggtagattcgacacgcggacttcctttacccgcataagtgccgaaagatttgtcgaacatgatatgcccgtttttcaacactaccacctggcaaccgggataagctccttggcgaataccgtctaatgcgatagaatcgatgcgtttcagatgagtggaagaaagtccgtattcttccggcacgaaatgcaatggcgtcttgggggtaatggtcactcctgctcccgttggaaacagttctcccaagcttgccgacaactgtccgtctgcggatgccttggcaaataacacatctgcgacctgacgctgcacgtctacattataactatgtcccaacacgactgccgaagcatgagccacggcccgctgaatctgcaacatcatcttccccggagtgaaaaacagataaatagccggactttgaggagcaaacttcgcaaagaaaggctgataagaagccagccgctgttcgctaatggctacaatgattcgtttataggtagacagagaatcacgcaaccgttggttttcctcttctgtctgattagcgcgaaggcaaaagcgggccaaagaggtataacgggaaagttgtttggccaatacatcagtttttccaggatttcccacttcgagcagtgcaatcttttgttccttgtctgtatgtagaggaaggatatgattcttattgctcaaaacagttattgccgctaaattcaaccgacgaaccaggtcacgtgtctgcggactattaatgcgttgttccagaccggataattgtacatacgatttcttcttaagtcccaacacatatttataagtcaagactttgcggcatttgttttcaatctcttcacggcttagttcccctttttcaacagctgccagtacggccggtatctcgtccttcaggttacggggagacagtaccatgtcattacctgctttcaaagcctgcaaactgacatttccatttcctgccacacctttcatggcaagcgcgtcggtaaatatcagccctttgaacgccagttcatcggtcagcaaatcatacacgacattgcgggacaaggaagacggaagtccgccaataggttcaatcaccggaacttgcagatgccccaccatcataccgcccagtccggcacggatggcctctttaaaaggataaagctccacactatccagacgctcgcgagtgaaaggaagtaccggaagcgctttatgcgaatcgacatcggtatccccgtgtccgggaaagtgtttgcacacagataacacccctccaccttccaaaccggaagcataagcgattaccttatcggccacttggatcggatcttcgccaaaagaacgagtattgatgacaggatttttagggtttatattcacgtctgccaccggagcaaagtttacctgcactccaatctgccggcattggcgagcaacttcacgtccgtattcatagagcagcttgttgtcacggatacatcccaataccatatttcgcgggaagacaggcgtaccgcgcaagcgcatagacaatccccattctccatcaaaggtaatcatcaaaggaactttggcttgtcgctgcgcccggttcgtcagttcgacctggttttgcatcttcccgccggaaaagagaagtccgcccactttataggtgtcgattacttcgcgcaacagttccagatttcgtttggtatctaccggggcaatggtatagatgaacaactgccctaccttttctttaaaggaaagcttatccataaccgaatcaacccagtgccggcagtctttgtcctgaagggctttatacaccagcagaggttcaacggttgtagcattctgcgccggacttgaaaccgtgccggccgcaataaggaataaaagcgttactattgaggggattatcttcatttatgtttcaaagtcaaatcgagacggcctacacgaacaccattttttcccgtgtgcataacaggcacctcttttccgtccatattcaagtatgttttggggccttccataaacgtatgggagtgtccacccagaatcacgtcgatattgtgtgttccggcaaccagatgttcatccatctggatgcccagatgagacaggcatacaaccagatcacaaccttcttcctctttcaacaaggtagctatctcgttggatacacggataggatcttcataaacgactccttcgcatttattggcctgaatcattccttccggctgggttccgaggccgaacacgccaattctcaaaccgtatttttccagaacgacgtagggcttgactatatcttttaacaccgtagcatcgagattatagttggcacaaacgaccggaaaatcagccatcttaaaaatacgggccatattatccacatcgaaatcaaactcatggttaccgattgtcattgcatcatagcccatttcattcatcagtttgatttctacttctccacggaacatattataataaggtgtcccctgggaaatatctccgcaatcgaaaagcaatacattcttatgatctttgcggaactcttcgagaaaagcagcccggcggacaaaaccacctttgttataatataggtcgcccttctgattgataggttcgatacggctatgcacatcgcttgtttgtaaaatgataacttctttggtatcctgcgcaaagattgaaaaagtgaaactcaatgcaagacatagcaggaataatatctgaaatcttttcatattcaatatttttagattctccttttttattttatcgtaatacgtccgtccagtttggaggtaatcgctttgccttcggctgtttgtttgcgtacataatcaagaaacagtccgcgtaaggtagcatcttcggggcatactctcttttctgcctgcaggaacgcatccattcgtccgtttccatctgccagatagtcgatagtagccactgtgtaaagctggtcatcctttagcggttttccggcaataaatgcgttcagcagctttccgtcttttgtgatttcgaggcggataccgctcactccttcgccatgcagagacgctattgcttcacaaagccgtcgcaagtctgtccctttcatagtcaatacacaaagggaattctcgaaaggaagaatttcaaaaacatctcctaccgtgatatctccttcgggcaagatattacgcaagccgcccatatttaccaatcccatatcggccggtttccccaatacctgggttgccgcttgctgtagaacacccgcgacaaggtcggatagcaagctttcaggagctcctttatccatcttcatcgtactggtaccgatgacttcatacatcatcgcatccaccttttccttataaggctttaagatttcggtagctttcacgttgggagtggtgtcccaaacagaatcaatcgttatcatgctaccctctactttggttacttcgtactgtgccgtagtctcgcgtgcggtccggcaggaagtaaacaggaaacctcctgcaaacgctgccaccatcagatactttacataagtctgtttcatgttcgctatttttagatatgctacaaatatacaaaaacatttggctatctggcaaataattcgttactttgcaccgctttcgcgcaatcgctgtcaagagaagagatacttggtatgttgcgttgtaacgatgaaacaatttaataataacaacaatggatttaattaaaattgcagaagaagcatttgctaccggaaaacagcacccgagcttcaaagcaggagacactgtaacagtggcatatcgtattatcgagggtaacaaagaacgtgtacagttgtaccgtggtgttgttatcaaaatcgccggtcacggagacaagaaacgttttactgtacgtaaaatgtcaggaactataggcgtagaaagaattttcccaatcgaatcaccggctatcgatagcatcgaagtgaacaaggtaggtaaagttcgtcgcgctaaattgtactacctgcgtgctcttactggtaagaaagctagaatcaaagaaaaaagagttaacggctaagccgaacttttcgattcgaaataaaaaagggaacttcattcattatgaagttcccttttttattgctaccattctcgcaaagctattatctgggaagtacattttctcaactatactcacacctgtgagaaaaaatactcatacctatgagaatatattcccattagtatgagtattatttctcatactagtgagaataaacccttttctgaataggctgtagatgccttgtagatggcggaaaggaataataaaacaaagccccgaaagtcatagactcccgaggcttcatcacctttattataataatgatatattattctttcaaatctttcagttcccaagccaatgcactggcacccagtacagcagcatcagaatccttcaattcggaaacgagcaatttcgtcttacctttatagatattcaggatattatcatcaatggccttctgaatcggtttcatgatatagtcaccggacttagccaagccaccgaacaatacaatggcttcagggctggaaaatgcgatggcgtctgccaaagcttcacccagaatgttacctgtaaagctaaagatttcctgtgccagtttatcaccttgtacagctgcatcatatacatcttttgaagtaatgttttctgcaggaatgttacgaagcaagctggcatccgtacgagcggcaaggaattcgcgagctgtgcgagctacaccggtagccgaacagtaagtttccagacatcccttacgtccacaaccgcaaagacgaccatcgcgacgagcgatcacgtgtcctaattcgcctgcaaaaccgtcatgtccatataccatctggccgttgataacaataccactacccacaccggtacccagtgtaatcatgataaagtctttcataccacgggcagcgccataagtcatttcaccgatagcagcagcatttgcatcgtttgtcaaagcagtggggatacccagtctttcttcaaacatggcagccaacggaagaattcctttccaaggcaagttcggagcaaattcaatcgttcccgtgtaatagttaccattcggagcaccgataccgatgcctctgattttatcaacgccaccattagcaataatcaatggaagcaggcttttacacacttcatcagcgtattcttctactgtaggataaccagatgttttgattgaactgctggcaataatagttccgcgtgcgtctacaattccaaagacggtattcgttccgcctatgtcaatacctactacgtagggcttttccatgtttgaattcatgatacttttatttaaaagggttagttaatcattaagtttactgcacacaaattacgtaaagaagattgagtctacaaaatgtttttcaaaaaaagttcaacctctttgcaacttttcgtatcttgcagccgtctaatagtagaaaattattagaaaacagaatctaaataaagaaaattgtgatacaactaacaaacgtcaacaagacctacaacaacggagcgcctctccatgtacttaaaggtatcaatctcaatatcgaacagggagaatttgtttccatcatgggagcatccgggtctgggaaatcaactttactcaatatattgggaattctcgacaactacgacaccggagagtattatctgaataacgtactcatcaagaacttaagcgaaaccaaagctgccgaataccggaaccgcatgatcggatttatcttccagtcattcaatctgatttcctttaaagatgccgtagagaatgtagcacttcctttattttatcaagggataagccgcaagaagcgaaatgcacttgccttggaatatctcgaccgtctgggtttaaaagactgggcacatcacatgcccaacgaaatgagtggcggtcagaaacaacgtgtggcaatcgcacgggctttaatcacccaaccgcaaatcattctggcagatgagcctacaggagctttggacagtaaaacttccgtggaagtgatgcaaattctgaaagatcttcataaactgggaatgacgattgtagttgtcacccacgaaagcggagttgccaaccaaacagacaagattatacacatcaaagacggagtcatcgaacgcattgaagataatatcgaccacgatgcctctccgttcggcaaagacggtttcatgaaataagtaataagtattaagtattgattccatgcggtcacagcgcagcctaatacttaatacctaatacttaatacctacttatcacctaatacttaaaaaaatgattgatatttggcaagaaatatacagtaccatcaagcgtaacaagctaaggacttttctcacaggatttgctgtggcatggggtatctttatgctgatcgtcctgttaggcgcaggaaacggattgatccatgcattcgagcaatcggcttccgaacgtgccatgaactccatcaagatttttccgggatggaccagcaaatcatacgatggactgaaagaaggaagacgagtgcaattggataataaagacgtggacgctaccgaccattattttccggaccatgtcattaaagccggggcaactgtgtggcaaggaggtattaacttaagtttcggacaagaatacgtcagtttgaatctttccggcgtatatcccaaccatacggaagtagaagtggtgaaactcttcaaaggacgtttcatcaatgaaattgatattaaagagcgccggaaagtaattgtgctccataaaaagacagcagagattcttttcgataaaacgcataccgagcctatcgggcagtttgtcaatgccggtaatgtggtttatcaggtagtagggctgtataatgataaaggagacagcggagacagcgatgcttacatccccttcaccaccctgcaaacgatttacaacaaaggagacaagttgaataacattgtcatgactaccaaaaacctggaaacgatagaagcgaatgaagcatttgaagctcattaccgcaaggtgctgggggctaatcatcgctttgacccgacagaccatagtgctatctggatttggaaccggtttaccaactacttgcaacagcagcaaggctcgaacatgctacgcatcgctatctgggtgatcggtatcttcacactgttaagcgggattgtaggagtgtccaacattatgctgattaccgtaaaagaacgtacccgtgaattcggtatccgcaaagctctgggtgccaagccgctttctattctctggctgattatcgtagagagtgtcaccattaccacgatattcggatatataggaatggtggcgggcatcggagtgaccgaatggatgaataacgcctttggcaatcagacaatggataccggaatgtggacggaaactgttttcctgaatccgacagtagatataagaatcgccatacaggctacactcacattaataatagctggtacgttagccggattattccctgcccgaaaagcagtcagcatccgaccaatcgaagcacttagagcagattaagactatgagaatagacatggatacttgtgaggaaatcctcattaccattacaagaaataaaacgagaagcctgctgactgcattcggtgttttctggggaatctttatgctcgtcgccctgatcggcggcggacaaggactggaaggcatgatgaaaaagaactttgaaggattcgcaaccaactccggcttccttgccgcacagaaaacgggcgaagcttacaaaggtttccgcaaaggcaggtggtggaatctggaagctatcgacatcgagcgcctccgttcgcaagtcaaagatgtggaggtcattactccttccattgcccgttggggttccaaagctgtatacgaagataagaaatacgattgcagcgtgaaaggattatatccggactatctccacatcgaatcacaagaaatggcctacggcaggtttatcaacgaagtggatatacaggaagcgcgtaaagtgtgtgtgatcggaaagcgtatctatgaaagcctgttcaaaccgggagaggatccttgtggaaaatacatacgtgtggacggaatttattatcaggtgatcggcatgtcttcctccgaaggggatatgaacatacagggacgggcttcggaagctgtcaccctgcctttcaccacgatgcagcaaacgtataatctggggggacggatcgacgtcatctgcttcaccgtgaagcatggaatcaaagtgtccgacgtacaaccggaaatggagcagattattaaagctgcgcattatatcgcgcctaacgacaaacaggcacttatgtacctgaatgcggaagcaatgttttcgatggtagacaatctgtttaccggtatcaacatactggtttggatggtaggattggggactctgttggcaggtgccatcggcgtatctaatattatgatggtaaccgtgaaagaacgtaccaccgaaattggtatccgccgggcaatcggcgcacgccccaaagatattctgcaacagattctatcggaaagtatggtgcttactaccattgcaggaatgtgtggaatctcttttgccgtcatggtgttgcaactggtagagatgggagcaaacgccgacggaggagacgtccgttttcaggttaccttcggactggcaatcggcacttgtgctcttctgatcgcactgggaatgttggcaggtctggcacctgcttaccgggctatggctatcaaaccgattgaagctatccgcgacgaataaagaggtgcgagggatttcaattattaatcgtaaacaataaaaatataaataaagtcatgaaaaagtatctgaaaatcacattattggtagtcattgctatcattcttgtcggaacattcgtattcctttatcagaagtctaaacccaaggtaatcacttacgaaatagtaaaaccggaagtcactgatctccaaaagaccacagtagctaccggaaaagtggaaccgagagacgaaattttaatcaaaccgcagatttcgggtattatcgacgaagtgtacaaagaagccggacaagctgtgaagaaaggggaagtgatcgccaaagtaaaagtaatccctgaactcggtcaactgaattctgcggaaagtcgtgtgcgcctagcagagattaatgcaacacaggcagaaacggattttgcccgtgtaaagaagttgtacgaagatcagctgattagccgggaagaatatgagaaaagtgaagtagccttgaagcaagctcgtgaagagagacagacggctaaagataatctggaaatcgtaaaagaagggattaccaaaaacagtgcatcgttcagtagtacgatgattcgttctaccattgacgggttgattttggatgtacctgtaaaagccggtaactctgtgattatgagtaacacgttcaatgatggaaccacgattgctacggtagccaatatgaacgacatgattttccgtggtaatattgatgaaacggaagtgggacgtatccatgaacagatgccgatcaaactgacaatcggagctttgcagaatctgactttcaacgccattctggaatatatctctccgaaaggggtagaaaccaacggtgccaaccaatttgaaatcaaggctgcaattaccattccggattccgttcagattcgttccggatattcggctaatgcggaaatcgtgttgcaaagagcaaatcaagtattggcagtgcccgaaagcactattgagtttaatggcgactctacatttgtgtacatcatgacagattcagtgcctgaacaaaagttccagcgtacgcaggtgactgccggaatgagtgatggaatcaagatagaaatcaagaaaggaataactgcacaggacaaagtacggggtgcagagaaaaaagataaataattgaattcaatgaaaataattcgtaaaaccatatcagcccttctgcttgccgggatcggaatcacttctatccaagcgcagaacaactctccgcaagcatggacattgcggcaatgtatcgactatgctatcgagcataatatagagattcgtcaatcggccaacagtgttgaagctaataaagtgagtgtaaacactagcaaatggacacgtcttccgaatttgagcggtagcgccagccaaaactggagttggggacgtactgcttctccgatagataactcgtatagtgacattaacagtgccaataccagtttcagcttgggaaccaatgtacctatatttaccggtttgcagttatccaaccaatattcacttgccaagttggatttaaaagccgctatagaagatttgaataaagccaaagaagacattgcaatcaatgtcacttccgcttatttgcaggttttattcaaccaagaattaagtaaggttgctcataatcaggtagatttaagcaaagaccagctaaagcgcatccaagggcttcacggagtaggtaaagcatctgcttctgaagtggccgaagcacaagcccgtgtcgcacaggacgaaatgactgctgtacaatcagacaatacatacaagttgtcattattagacctcacccaacttttggaattacctacgcctgaaggattcgtgctcgaaagtcctaaggaagaactagagttcgaatctctcaccccaccggatgatatatatacacaggctcttgcttacaaaccaagtattaaggctgcagaataccgtttacaaggtagtcttaatagcattcgtattgttcaaagtgcattctatccacaaatctctttcagcgccggtttgggtagcaattattatacggtgagcggaagatcagaaaacagcttcggcagtcagataaagaacaacttgaataagtatgtaggattcaatttgagcgttccgatctttaatcgtttttctacacgaaaccgagtacgcaccgctcgtttacaacaaatagacttatctttgagattggataacgcaaagaaagtactctacaaagagattcagcaggcttggtataatgctctagctgctgaaagcaagtacaactccagtgaagtggcagtgaaagccaacgaggagtctttccgcctgatgagtgagaaattcaataacggcaaagctacctttgtagaatataatgaagccaaacttaatctaacgaaagctctttcggataagttgcaagctaaatacgactatctgttcaggactaaaattctggatttctacaaaggacagattatagaatagatcctctccat

SEQ ID NO: 8255 - DNA, 11799 bp, Unknown
  gut microbiota DNA sequence
atccaaaccttgtcttcaatcacaatcggacgtcctcaggcgtacgataccccgtgttcatctcggttgcagtctttatggtagcgaaaatatccgcaatcagttcatcataacccggttcatcaggtgagaccatctcaccgctcaagtcttttgcaaaaatatcgttcatcatttaattgttttaattgtatatagctattactactgtttactcataatttattatttcaggttctttctgaagaagtcctccaatttgtcgaaaggaatcgtacggtcgtagagatcagtatggttcgctccagggataatcatcagttctttatcacctgtcaactttttgaaagcatcctcactgaaataacgcgaatgggcattttcaccatgaataagaagtacggggcgggaaatctcatgaatataagctaatagcggcatattgataaaagacagcgtcatcgtaggactccatgcaccattggaattgatagagcgaacatggaaaccacggttagtcttgtaataatcgaaataatccttgacgaattgtggctcttcaccggtgatgctgtcaggcaacccagggacaccggaagtgattgtaccactctgcgcgtcacgggtacggataacattcatcatctccctttttttgttgcggtcgtcggcactatcctctgcgtcaaaatagccattggcattcacacggctcatatcgtacattgtcgaagccactgtagccttgatacgtgtatccatagcagcagcatttagtcccatcccaccgaaaccacagataccaataatcccgatgcgctctgcatccacatcaggcaatgctgtgagaaaatcgactgctgcgctgaaatcttcggtattgatgtccggtgaagctacattacgaggttcaccgccactctcaccggtatatgaggggtcaaatgcaagagtaaggaacccacgttccgccattgtctgtgcataaagaccggatgcctgttcctttacagctccgaaaggaccgctcacagctatggcagcgagtttgccttcaacattctttggttcgtagaggtcggcagcaagtgtgatgccgtaacggttcttaaacgtcaccttacggtggtttaccttgtcgctttgcgggaacttcttgtcccattcttgagtaagattcaatgtttccatattatcacttgtttcttgatttgttttactatttgtgcagcctgcgcccgcaagcatgacggttcctaacaagactgcgattgccacggatgtaagattcgttgttttcattctgctattacttaaatggttgttgaattattctttcttattttacagcgcaaaggtaaagcaaaagccccacagcggcattgctgtgaggctcaaatagtattgctcaaaagctcaatataaaactatcccgatttacacaaataagaattctatgcaaatatggcggtcggtgatataccatattgtttcttgaatgcggttgaaaaatgggaaggattcttaaaccctacttctgcgtagacgtccacaacctttttaccgccttccttcatcttgttgtaagccacctcaagacgcttgcgaataagccacttttcaggtgtcaggtcacttatcttcttgaagtcccgcttgaacgtggcaaggctgcgcccggtataatgagccatttcctccattgtgaactcatacatgtagttctcgctcataaattccaggatatctattttccacggctcgttgaaatcgaaaagcgtcggggcaaaccgttcatctatatccaacaaagcgagcagaccttcctgtatcttcagattcataaaatcatctttcggttttacttcaggattgaaataaggtgtcattgaagcgaaaaggcttgcgagttccaccgtttggggcagttttatcacacccgaatcaagttttggagtattgacgggtactctccgctgtcccaatttgctatacatctcacgtaaaaaacgacgtgtaaacatcaggaaaataccacaataccgctcaccgttgtacgttctcttatacattgttatatgatgatcgcgggggataaagacacattcgccttttctgacatgaatttgttcttttccattatcgagaatcatctcacctgaatacacatagttgatagcatattcacgagaacggtgtatacaaccgccaaggtcatcataatagaagctgtaaaatacattgttataattgaatataagcttcattggttctacttgttccgcatcgcccttagtcataacattgagtgtttttttaatttccaatcgcaaatgtaacaaaagaattctgtttcttaacggctcattatccttttatttgtgtgagggtatttgaactatctaaccgaattgaatcttttgtgggatgtacaggagttttcgctgaaaaatattccttaagtaacaatcagggaaagctataaataaaagcataggataaccaagcatcagtgtacataatgtgacaaaaaacgcaaaattcaaatgagttctctttcccctgactatatattcatagaatatgcaataaactcaaaacgttgcaaatttccgtcctcatttgccctgtttacataaataaaaactatctttgcgtttcagaatcccgaaagacgaaaagaaatggagcaaatagacaacctaaaagagcttatcaatcagggggatgtggacacagcgattaagcaattggaccagcttctccaggacagttctgtcgaaaaagataaagatactctttactatttacggggaaatgcctaccgaaagaaaggagattggaagcgggcactggacaactaccagtatgccatcgagctcaatccggacagtcctgctgttcaggccaggaagatggcaatagatatcctcaacttctaccacaaggatatgttcaatcaataaaagagatgtataatcaataaccgtactcaaagataacgtaataaaataaagattatggcaaaaatcaaaggagcaatcgtagtcgacacggagcgttgcaaaggatgcaacctgtgtgtagtggcgtgtccgctcgatgtaatcgccctcaataaagaggtaaacatgaaaggctataactatgcctggcaagtgaaggaagatacctgtaacggatgcagctcgtgtgcaacggtttgtccggacggatgtatttcagtgtataaagtaaaagtagaataaaagaaaagaatatggcagaagaagttgtattaatgaaaggaaacgaagccatcgcccacgcagctatccgttgcggtgccgacggttacttcggttatcctattactccccaatcggaagtgttggaaacgcttgccgaactgaaaccgtgggaaacaaccggcatggtagtactccaggcggaaagtgaagtggcagctatcaatatggtatatggaggtgcaggtagcggaaagaaggtaatgacctcatcttcaagtccgggtgtgagcttgaaacaagaaggaatctcttatttggccggtgccgaacttccttgtctgattgtgaatgtaatgcgtggcggtcccggattgggaactatccaacctagtcaggctgactacttccagacagtaaaaggtggtggtcatggagactacaaactgattgccctcgctccggcatccgtacaggaaatggcggatttcgtagcattaggattcgaactggctttcaaataccgtaatccggctattatccttgccgacggtgtgatcggtcagatgatggaaaaggttgttcttcctgcacaaaagccacgccgcacggaagcagaagtaattgaacaatgtccatgggctgctaccggaaaagcaaaagaccgcaaacctaatattatcacttcccttgaattgaaaccggaagcaatggaaatcaacaacctccgttttcaagctaaatatcgtgaaattgaagaaaatgaagtacgcttcgaagagatcaactgcgaagatgcagagtatttgattatcgctttcggttcaatggcacgtattggccagaaagcaatggaactagcccgtgaaaaaggaattaaagtaggtatccttcgcccgattacactgtggccgttcccaaccaaagcaattgctgcatacgctgataaagtaaaaggtatgctcgttacggaactaaatgccggacagatgattgaagatgtccgtctcgctgttaacggtaaagtaaaggtagaacatttcggacgtctaggtggcatcgttcccgatccggatgaaattgtaactgccttgaaagaaaaaataatcaaataacgaaacaatgaatcccgataaaataagaaacgtactgaacatcctatttatgatattggctgttgcagccatcatcacctactttgtagcaaaagatgatttcaaaatgtttatctacgtatgcggcgcggcaatctttgtcaagctgatggagttttttatacggttcaccaacagataaggagatgaagttatgactaaagaagaaataatcaaacccgagaatctggtttacaaaaaaccgactctgatgaacgataacgccatgcactactgcccgggttgcagtcacggtgtggtacacaaactcattgccgaagtcattgaggaaatgggtatggaagataaaactgtgggaatctctccggtgggatgtgcagtgtttgcctacaactatcttgatattgactggcaggaagcagcacacggacgtgctcctgctgtggcaactgcagttaaacgcctgtggccggaccgccttgttttcacttatcagggtgacggtgacttggcttgtatcggtacagccgaaacaatccacgctttgaaccgtggtgagaacatcacgattatctttatcaataatgcgatctacggtatgacaggcggccagatggctccgactacactggtaggcatgaagagttcgacttgtccttacggacgtgacattgaacttcatggctatccattgaagattactgaaatcgcagcccaactggaaggaactgcttacgtaacccgtcagtccgtacaatccgtaccggctatccgcaaggcaaagaaggcaatccgcaaggcttttgagaactccatgaacggtaaaggttccaatctggtagaaatcgtttccacttgtagttcaggctggaagatgactccggagaaggcgaacaaatggatggaagaacacatgttcccattctatccgctgggtgatttaaaagataaagaataacgctaaaagtcaacagaacaatgaaagaagaaataattatagcaggattcggtggacaaggcgtattgtctatgggtaagattctggcatattccggtttgatggaaggcaaagaagtgacctggatgcccgcttatggtcccgaacaacgaggtggaacagccaacgttacagttattgtaagcgatgacaaaatatcctcaccgattcttagtaaatacgacgctgccatcattctgaatcagccttcactcgaaaagtttgaaagcaaagtgaaacccggcggtatcctgatttatgacggttacggaattatcaaccctcctacccgcaaggatattaaggtatatcgtatcgacgcaatggatgcagccaacgagatgaacaatgccaaagcattcaatatgatcgtacttggcggattattgaagcttcgccccatcgtaacgttggagaatgttatcaaaggacttaagaaaaccctgccggaacgccaccatcacttgattcctatgaacgaggaagctatcaaaaaaggtatggagttaatccgtgaggtttaattaacagataatgtacaatggataattgataattattagctacgtatagtacgtatgcaacataattttcaattatccattatcattaaatcaattaaagtaagtatctttgcctccaattatgagacgaatcttactattatatataatcttttccgttataggtttgacaactgtccatgcacagttcgataatggtcgccagagagtggacgaaaacggatacgaccaatacggtaaccaggtggaccctgccatgattccggacagactggatagtgcaaatgtagaagtacaggggttacctccgaaattatatatgtggcgtattaataatcagttgggcgaccggactatcatcccggcggatactgcttatcaccacttccaaaacaccaatcttaccgaaggacttaccggacattataattatctggccaatatgggttctccccgtatgtcacgcatcttctttgaacgtcgtgatccggaacctactatctttatggagcctttctccagtttctttattcgtcctacggagttcaatttcaccaatagtaacgtaccttataccaatctgacgtatcataaagccggtaataaaataaatggagaagaacgttttaagtcttatttctctgtcaatgtaaacaagaagctggctttcggttttaacatagattacttgtacggacgaggatattataataaccaaaatacggcttatttcaatgcggcaattttcggtagttatatcggcgaccgctatcagatgcaagccatctacagcaacaattatctcaagacaaatgaaaacggaggtattgaggacgaccgatacatcactgctcctgaagagatggcacaaggccaaagggaatatgaatcaaccaatatcccgactgtactaagcgccacaaccaaccgtaatcatgacttttacgtattcctgacccaacgttacaatctgggattcagccgcgacataccgcaggccgaaaatgacactactccagccaaacaagagtttgtgccggtcactagttttatacataccattcaggtagagcgtgcacgtcatagtttcaactctgatgatgacatgcgtgaaaagaactattatcaaaacacctatttggaaccggataatccgattgccagagacagtactacctacatgggtatcaagaataccataggtattgctctacttgaaggattcaataaatatgccaaagccggactcacggcattcgcttcctataaaatcagcaagtacactcttatgaatatggaggggaatccgttgcccgacaaatacaatgaaaatgaaatatttgttggaggcgaattatccaaacgtgaaggaaatgtacttcattaccatgccattggtgaagtgggacttgccggaaaagcaatcggacaattcaatgtgaaaggagatatcgaccttaacttcccgttatggaaagacactgtgagccttatagcccgtggtgaagtcagcaataagcttgcgcctttctatatgcgtcattatcattccaaacacttcatgtgggacaatgatatggacaaagaatttcgtacccgtattgaaggagaattaagcattgcacgttggagaacacgtttgaaggcaggagttgaaaacataaagaactacacttatttcaaccagcaagcggtgccggaacagaaaagcggaagtatacaggtgttgtcagcaagtcttaatcaggacttcaagctgggaatcttccatttagataatgaagtaacctggcaaaagtccagcgaccagaccgtattgcctttgcctgatctttcgctgtatcacaatttctatatgcagttcaagctggcaaagaaagtgcttagtgtacaattgggtgccgacgtgcgttatttcagtaaatacaatgcacccgcttatatgccggctatccaaaacttctatttgcaaccggaaaatgaccaggtagagataggaggttatccgatcgtgaatgtatacgcaaacttacacctaaagcgtacacgtttctatgtaatgatgtatcacgtgaatcaaggtatgagcagcccgaattacttcttgtctcctcactaccctatcaacccgcgtgtactgaaattcggtctttcatggaatttctatgattaacaaaatctatatggcttatggtaacacgccccaaattgagactgtcccgatatttagtgcccgtaatcattgtattggcaatcatcttttctatccgccaatgcggtaatcaggaaaaaccgtcaggacacccgcgtgattatgcagccattgccaaagaaggtatattgcgtgtagcgactgaatataactcgatcagtttctacgtggacgatgataccgtttccggtttccattacgagctgatacaggcttttgcccatgacaagggattgaaaaccgaaataacacccctgatgagttttgaagaacggctggaaggattaagcgaaggacgttacgatgtaattgcctgcggcatattagctaccagcgaactgaaagattctctgctcctcacctctcccatcacgctcaacaaacaagtgctcgtgcaacggagagaaaacggagaaaacgattcactctatatccgtaaccaactggacttggcggggcggacacttcacgtagtaaaaggctctccctccatcctgcgtatccaaaacctgggaaatgaaatcggagataccatttatatcaaagaaatagataaatacggttccgaacaattaatctcaatggtagctcatggagatatcgactatgccgtttgtgacgaaagcatcgcacgcgcggccgccgattccatcccgcagatagatataaatacagccatcagctttacacaattctactcatgggcagtcagcaaacaatcacccgctttactcgatagtttgaatacatggctggataaatttcaaaaggagaaagaataccagaagatttataaaaagtactatgataaagaataaccttatcattttacatatcagaagaaaacaatcaaaaacagaatgtaagatagatatattcatgtctatttccagaaataaactcccaaagacttgactttcgctttcgaatgttgtatctttacagagttaatgataaagtagtttcaattaaactacatgcaaaggagggaatcgcgattctctcctttctttttatccagccgggaaaaacctctccccgccccgacttttcctttcgctttgcccggtggttatggttcttcagccggaggatcagcaatgttcaccttgcttcttaccgaaatgaagtatatatccgcctcaaacagacgttctgtttgcctgaaacagagcctctgttccgataaaacagagcttctgttgaaacaaaacacaatgtctgttttccaactgtccccgctaagttaataatcaataaagttgctcttgacaaaaaatagctttatctttggggtttgttagaacagacacaataggtatattatattatgagtgaaaagattatcaaatggggcttcattggttgcggagaagtaaccaagacgaaaagcggtcccgctttccagaaagtagaacattcggaagtcgtagccgtgatgagtcgtgacggcgcgaaagcgaaagcgtatgccaaagagagaggaatcaagaaatggtatgacgatgcacaggagctgatagatgatccggaagtaaacgctgtctatatcgccactcctccttcttcacacgctacgtatgccattatgtccatgaaagcgggtaaaccggcctatattgagaagccaatggcggtgacgtatgaagaatgtactcgaatcaaccgcatatccaatgaaacgggggttccctgtttcgtagcatactaccgacgttatcttccctatttccagaaagtaaaggaattagtagagaacgggacgatcggcaacgttatcaatgtacagattcgttttgcccagccgccacgcgatctggattacaatcgtgataatcttccctggcgtgtgcaggctgatattgccggaggcggctacttctacgaccttgctccgcatcagattgatttgttgcaggatatgttcggttgcatcctcgaagcaagcggttacaagagtaatcgtggcgggctttatcctgccgaagatacattaagcgcctgtttccaatttgacaacggactggtgggtagtggttcctggtgtttcgttgcccatgattctgcccgcgaagaccgcatagagattatcggtgacaaaggaatgatttgcttctctgtctttacttacgaacctatcggactgcataccgagaaaggacgggaagaaatctgtatcggcaacccggaacacgtgcaacagcctcttatccaagcagtagtagatcacttattgggtaagtcggtttgctcttgcgatggcgaaagcgcaacgttgactaactgggtaatggacaagatcttaggtaagctataaccctaaaaaaagcaaaaaaaagttccttctttttccggattctgccggtattgttaaaaaataaatagggacatcccattgtatattgttagttttttctatctttgtagaaagaagcaaagaaaaaatgaaactaacaatatattttttgtgccatgactaaagaagctttaatgagaaaagcgatcgagctttcaaaagaaaatgttgaaaatggtggaggtcctttcggtgctgtgattgccacgaaagacggagaaatagttgcaacaggagttaatcgtgtcactgcatcttgtgatcctacggctcacgccgaggtgagcgctatacgtgccgcagctgccaaactcggaacatttgatcttagcggatacgaaatctatacttcctgcgaaccttgccccatgtgcctgggtgctatttattgggcacgcctggataagatgtactatggaaacaacaaaaccgatgccaaaaacatcggcttcgacgactcttttatctatgacgaactgcaactgaaacctgaagacagaaagctgccttccgaaatcctactacataatgaagcccttactgccttcaaagcctgggtggccaaagaagacagagtagaatattagaaaacctctcactattattaacctattaattaccctcaaatgaaaagaaaaagccttttatttgttatggcatcagtatgcctgttcagttgtcaacagcaagaagaactgcaagatcccagtaaaggagtgatcgacttttctacttctattgaccaaagtatcaacaatgctcttactcgtaacagcagtagtctgacacttccgttaaagagcaatttcgctgccggggatgtcatctccatgtccgttgccgagcaggattatcatccgtttgccataggcatggatagccagacttggaacgaagcaggcaccgattcggaaacggttactttctatgctcattatcctgaattgaccgacgaagctgctactaccagatcattgagcagccgctatcgtgaaatcaagggtggcttagaatatttgttcggtacagcccaagccaacaaaggttctaagaacgttgctcttgcatttaagagaatgacaacgcccgtcgttctgctcgacgagaacaaccagccgtacgaaggtagagcaatcgttaaactgttcttgaagaacaaaggtgtgcaagacctgttcagcggtaaaatcgaagctgaccccaatgcaaaaccggaatacattgatatccggaaagtatctgaaggtatcttgactaacttgatcccacagctcatcaaagccggcgagaaaataggaacggttatcctggaggacggtaaagaagaacctatcatcgcagaggaggacattaccatagaagccggaa

SEQ ID NO: 8256 - DNA, 2142 bp, Unknown
  gut microbiota DNA sequence
aaaactcgatttttctatataattttgtagacaaataatctaaaaataaatatactagagaatgaaaaagttaatctacacgttgttctttgtccttatctccgttgtagccaacgggcaggcaaagtacgtattctatttcatcggggatggaatgggagtcaatcaggtaaatggtacggagatgtatcaggcggaaattcaaaatggacgcattggcgtcgagcctttgttgtttactcaattcccggttgctactatggcaactactttctctgctaaaaattcagtaaccgactctgctgctgcaggtactgcattagcaacaggcaagaagacctataatcatgcaatttctgtgggagaggacaagaatgctattcagactgtagctgaaaaggcaaagaaagctggtaagaaagttggtgtaactacttctgttagtgtagatcatgctactcctgccgcattctatgcacatcaacccgatcgtaatagatattatgaaatagctttggatttgccaaaagcaaatttcgatttctatgcaggcggtggtttcctgaaacctaccaccacttatgacaagaaagaagctccaagtattttccctatttttgaagaagccggatatacagtagcacgtggctacaatgactataaggcaaaagctgcaaaagcagaaaagatgatcctgattcaggaagaaggtgctaatccatcttgtttaccttatgctatcgatcgtaaagaaggtgatttgactttagcgcagattacagaaagtgccattgattttcttactaaagataataagaaagggtttttcttgatggtagaaggtggcaaaatagactgggcgtgtcatgcgaatgatgctgctacagtgttcaacgaagtaaaggatatggataatgctatcaaggtagcttatgagttttataaaaagcatccgaaagaaacccttattgtcgttactgccgaccatgaaacaggtggtatcgtgctgggtacaggaaaatatgaattgaacctgaaagcattgcagcatcagaaacattctgctgacggactttcacaacgtatcagcgaattgagaaaatcaaaaggcaataaagtgacttgggaagatatgaaaacattcttgggcgaagaaatgggtttctggaaacaattccctatttcttgggaacaggaaaagaaattacgtgatgagtttgaaaaatcatttgtgaagaataaagtcgtatttgctgaaagtatgtactctaagagtgaaccgatggctgcacgtgctaaggaagtgatggatgagattgctatggtaggttgggtaagtggcggtcactctgccggttatgtacctgtattcgctatcggcgcaggttctcaactgtttggagaaaagattgataacacggagattcctaaaagaattgcgaaagcagccggatacaaataaatatcgataaagacataaaaaaaccgggagtccaaaaacttccggtttttttatatatgttcttgtcaattatgcttttacacgtcctacataagaaccatcgcgagtgtcgatttcaattgtttcaccttcgttgatgaacaatggaacacgtacggttgctcctgattctacagtggcaggtttcagcgtgttggtagctgtatcacctttcacgcccggttctgtataagtcactttcatttgaaccttgatcggcatatctgcataaagaacagtttcagtagaagcgtcagaaacaacttccaatactgcaccttcgagcaggaagtcaaccccgttaatcaaatcgtgagcgatagggtgttggtcgaatgtttcttggttcatgaagatataatcttctccttctttatacaaaaattggtacggacgacgttctacgcgtacatcttccaacttttcaccgatgttgaaacggcgttcaagaacgtaaccgctgactacatctttcagtttagtacgcatgaaagtattacctttacctggttttacatgcaggaattcgatacagaaatagagctttccgtccatacggatacaagttccgtttttgatgtcttgagcattaatcatactgctatttttcttaatatattattgttatttaattgttttcg

SEQ ID NO: 8257 - DNA, 16623 bp, Unknown
  gut microbiota DNA sequence
aatgcaattttacatcaattgcataaatcaggatacaaatcctctaaatcaggaaaaaaatctcctcattttataaaaaagaatagagcttacaaatttcaaacaattatacggcttttattcttctttttcctatctttgccacaatatcaataaaaatcacacaaattattcacttaaacacaagaagcatgaagcaccttaaatttctatttgcacttggcggcattcttttcttatcttgccaaacagtatccgcacgtggtttaaaaatccctttcggcgaccgcgaagtattaaccaaagtagcagatttgcctgataccgaagagtaccaaacagacgatggaaactacattgatctggcaactttccatcaggagttcaacatcgcttaccttctccctctatacatagagaaagagcctcgcctggtcggctattgcgaaaaggaagacacttactatgaactgacggaagaacaactggctaccatcctaaaagaaaataatttggatggagagaagttgaacaaggtcggtttctattcccgttatggtggtaaagctgtcggacttcttataattgcccttatcatttggggatgtattcctggaaaaaagaaagaagtgaaacccgtggaagtataaaacaaaccattattaataacattaaaaagtacaaactatgtctatttacacctttattccggtcattttcattgttctatatctaggatactggttttacatgaaaaacaaaaactcgcaacaggcacaagtagtgaacaacaccgatttcaaagctgaatttgcaaatgcagaacagtataaaaaactctgcttaaactctgatttatctttcctgaaagaagctatgggagaagaaaaaattgacgctttcaactatgccagcaatgaatatggtgtagcatccgcactcaaagacgggatgaaagataagctgaaaggaatggccactttaggaactgtacgtttcaataccgtacaaactcccaaatatctggtattgagcggagacaatctgcacctattcgatacagacacagatggagaaatcgacaatcattttgtattcaatcaggcgcgtcttgaaaattcccgtctcatcgcaattcctatggagggacaagtacaagcacaggcacaagccagaggaaacaacgtgaaagcatacaaactttcattgcaaaccgatgagaaacctgttgaactcattatctactcctgtctgatatttacaaatatcccggagattccgacagatccacaagaaacaatacaggatattatcattggcaatgacttcttgaaacaattgggtgacaaatatcctaatttgaaagtctcattgccgatatttagctaaagaaggacatatacttagaaaaaataacagcggaaggttagctagttaccaaacattatgcgtcccggcgtcccggcggatttgcaatccgccgttctccgagtatcaggatttataatccgcaatacacctatactttaatatatagttcgaattgaaaatcctgatgctcaaagcaatcggattaaaaatccgattgaacagagaacagatctctgcagatactccccgcagaaattcaaaagtaaaattaaaagcgatacagtttcgttcggacaagaagctgaaacaatctgtcggatatataaaaacaaagcaaatgaagcgagtcaagcactctgccaaattatcggaaatagagatagacatgcggctaaaagagtatttcagcgatcatcagattatgcaacgttccgactttcaaggcatcacagggatggtacgttccacagccatgattcatattcgccgactccgtcaggaaggcaaactgcaaaatatcggtattcccagtcaacctatttatgtgccgaccccaagattttatggaaaattcagagattatcagcctgtcaaataaactaaaacaaaaacaaaatatcagaggagatacccccaaataacagatataaaaaaggcggctgaaagcatgaacctctcttttcagggttcgctttcagccgcttttcctttccagcaagcgattacagagaatcgctgaatgctgaaatcgcttttttactttttattactgtgcagattctaccaatactacacggttcagaatcggttgaccgaatttgtcaacaccaccaccggctgcaactttcagtctatcggcagagatgccatacttcttaactaacaagtctttaacaacctgtgcacgttccaaacttaacttctgattgaaagcaggagtaccggttgcagagtcagcatatccgttgattgtgtatgtagcattcggagattcttttatcttgctggcaagatatgacaagttcatttcttcttgcggagataatttatcagaaccgatcttgaagaatacggtacgcggagcaatgttagtatctgtgataacaacttcttcagtatcttctacttctactggttgttgtgcatttgccaactgttgttgcaattgcatattagctgccgccattgcattcatctgattacgcatctgattcaattcgagttcagagataatctgtggagtaggacgttggaatccgcgagtagggaagtaataagtcacaccgagggtagcacctaagataccatcataatcgggtctacctccatgttctccgtcaaacttgccttccagacctgttgcactcaactccagattcaagtcaacagcattcgacaaacggaagcggttgataatacctgcattgaaagtagcggagttagtgtgaggacgagaataagcatgagcccaaccggcacctatataagggataatttcatatacacggttcggattgtatccaccaaaaagtgcgttcaagttaatcatcaaatcaccatgcaagttcatgtagtcccatctttgtttgtaagaaccgtcttctctcggaccacccactacataattagcagtttcgctggtagtgaatccttttgcctgcagtccgctgtattgcaaacgcagtccgaatccaggagttacccatttgccgacagacacgttaaatgtaggagcaacacggtctctgaatttgccgatatggtcattgtttccatatagcacctgggcgccgcctcctatagagaagaaccagttactccagaaaggattagttattacttgatatttatcttgtacctgaatcacttcgtattcagttacagtcattgtctgctgcgcagaagcgacagacgcaacgctggcaaatgccagcaacatcagaatctttttcatatacctaatagttaagtggttatttaaatctttttctttgttgaactatttaaataacacgaactgaactaaaaggttttagaaaaagatgaaattatttgttttatttgaataatctttcgatgtcttcctccttgattgttgtcaaaacagttttcccatcaggggtgtaattcggtgagggacaggcaaaaaggttatctacaaggcttaccatttcttcattactcaacacctgtccgtaaacaatagccgctgcacgggccaatgttaatgccagaatactttggatttcttccttgacatcacttcctttttccatcgctgtatgcagcatattacgcaccagttccaccggattcagcccttcaatccccgaaggaataccattaatggcatagctaccgcctcccagattactcaaatcaaaaccgaccgcagacaaatcatccataatactttgcagtacagcagcctcggaagccggtaattgtaatatttccgggaacagaacaccttgtgataccccctgcttctgttggatctgcaccatatagcggtcaaaaagtacccgtatgtgtgcccgatgctgatcaattagcatcagaccggatttaactgaagtcagaataaaccgccctttaaactgcaaatgctgatttcctttttccataaccggttcactggcatacaaagtggaagaagcagcagatacgaccgtctccatcttttcttcaacgaaagccggttcactcccaatagaagaatcctcccaattcatttcgggttccggctgcggattgttcatcttactggctttcgtcagccctccgtacaaatcttcccattccactttcgaacggctgtacgacccgccaccaccagtagagactttaaacggattatagtctgtattataatgtatcttcggaggctcggaagatatcttttcctcaaatgccggaatgtcaggcatgtcttccgtatcaaaatcaatagaagggatcgcactgaatttacccaacgactccttcacggatgctgaaagtatctgccaaatggcctgttcattttcaaacttgatttcagtctttgtcggatggatattcacgtcaatattagccggatctacatcgaaatagataaagtaggaaatctgttcaccggtgggaatcaactgttcataagcctccatgactgccttatgaaaataaggatgacgcatataacgcccgttgacaaagaaatactgatgtgcccctttcttacgggcagtctccggcttggctacgtatccggagattttcaccatggtagtattgacctctatgttcagtaactgctgattgagcttcttaccgaaaatagcaaggatacgttggcgtaattgtgatactggaagattgaataactccgaatcattactataaagcgaaaaggcaacctccggatgcaccaaagcgatccgttcaaattcggcaaggatgttactcaattccgttgaattagcctttagaaatttacgacgggcaggtacattaaagaataggttctttacagagaagttacttcctttagaacaggacacagcctcttggctttccacttgagagcctgcaatcaccagcttcgtgcccaactcttccgattccggacgtgtctttaactctacctgtgccacagcagcgatagaagccaatgcctctccgcgaaatcccattgtacgcaaagcaaacagatccgccgcttgacgtatcttagaagtggcatgtcgctcaaaagaaagacgggcatccgtttcggacattccttttccatcatcaatcacctgaatgctggttttacctgcatcagtcaccaatacatgtatattttgtgcatctgcatcaatcgcattctccactagctccttgatgacagacgcgggacgttgtatcacttcaccggcagcaatctggttagctaccgaatcaggtaacaaatgaattatatcgctcattcttcgtaaattaataattaaaagttccagcttcctgtcgccaaataatgccacagataaagaaggaaagcaatgattatcagtatgattccgaaagagaccggtttgcggccactcgcttttcttcttttcaaatgcgtagtaccttcaatgaacttaccgcgaatatcctccggattaaattccttttccggaagcatccccaagtcacgtttggcgttctcctccatctttgcgagcttttctttccgctcgtctacataaatgtattgatgattaaagccacggggctttctcattgagttaaacattcccatactacttcatatttattaagtttcgcttttctgttttgggtcgccggtcggtggtcggtttcagtgtatcacccgcacgcttaccccgccagttaaagatatcatccttattcagcggacggacatagtcgaaccaggcaaaagtgggaagacgtaatttatcaggcggtatctggtccatcggatacatcgttccgttggatttaccgataaacagtcctttttccatcttcttatccttcatataaagatgaagcacactaccttccagacaattaaatccggtcatcgtactgtctttttcttccggatagaaagcggtcaacacattaccaatcacttcaatatgacgcatatctccattaatgaaataggctttcatctctttgccggacacttggttataatgaatagaatctttcatttccaccgtcaacgcctggttgatgatgtgcgcccagtcaatcgtgctgtcattcatataaatcttgatctgctcgccaagtagttgctgcccttcattccaaagaatagggtcggtatacatggtcatacaggaatccttcgaattatagaccagtgagtcacatactccctgaacatccgtacgatacatacgtaccttgtgataagctttcatcaaccggaaaacggaatcggtattcaggttgtaagacaccaactgcaatgtatcgccatgcataaaaagactgtcaggcccttgcgagtagtcgattgccaccgcacgtttcgtcgcaaacgcggagtctgtcaattcattatagaaacaataatcacccgtcagcatattcttattaatggaatctgtcatcttcacattatcgaacgcctcgccataaccgatgatacggtcatagaacagactgtcgcctaccagtttctttccctgattggtcagtaccgaacggtctaacaattcggcttgttcggtcattgtgttataaaatccccgttccgaatagatatgattattatcactgacgatattggaaggtccgagaataactgcgattttgctttccgtattataccttaatgtatcggaagtcaacacaaactttgggtttaccaacttcacatcatgattgaataccgactgttttgttgcaggactgtattctccccaatcggaagtcaatacattctcttcatccatcaaggttcctccctcgaaataatatccgaggtcgtagagacggtcgtaattcaagctatctgtcaacagggtggtgttccggttaatcatcttcacattttcacgaagctgcgctatttgcgtcatgccgtcataataaagataatcaccgtagatgaacaaagtgtctccctgttccatacgtacattactgaaggcctccacagagttggttttctcaaaaatcagtgcactgtcacagtacatatacatactgtcatggcgcaatttcacgttaccaatcaatacctgcacatccggacgcgccaacttatccgcctgaccttcatcagcatgaagcagataaactttggtctttttattctccggttgtttcttgttgtccgattgtttcttattgcctgccggtgttttggcttttgaagccgacttagacgtatccgcagccgatttaattgaatcccctgttacaggtttctgtcccgttggcctcacttgtgctacaagacatacaccaaacaggcatagaaagcctataaggagccatctatgcctgtcttgttgtttatttttcttatttgttttcagcatataaaatcaaagcaaggttacatcagtccttcttgacccaacccggatacttgaagtcacacttctgccagttttcgttgatgcgtacataagtatgtttctgtttgtccagaatccatttctgcaacatctcttcacggcgtttgtccatcacaatttctttcaagtcctgatagtcttctgcaatggttgctttatgaccgttgatttttgctttcaacttcacgatagcacatacttcttttccatccttctcattaatcattgtaaaggctttggaaatttcgcctacattcatcttatccactactttagcaacgtcttgaggaagatcctgcatctggaacttagaagtagtcacacctgaattttcattgatgttcaccataataccatggttgttacgagtatctttatcctgtgagataacggcagccgcatcatcaaatgtaaatttgttggcacgaatatcatcagcaatagaatccagacgggcacaagcctcggtcagttctttttccgatactttcggacgcaacaagatatggcgagtgttgacacggtcaccacgtttttcaatcaactggataatgtggaaaccaaattccgactccacaatcttagaaactttcttcggatcttgcaaactgaacgctacattcgcataagcagggtccatcataccacgtcccatgaatccacattcaccacctttaatggcagatgccttgtcttccgaatacaaacgcgccaatgtagagaagtcgatttctccttttgtcacacgatccgtataatcacgcaacgtcttttttacatcctcaatctccgagataggaattttcggttgtaaagtaatgatctgcacttctacctgtgtcggaatgtaaggaatactatcttgtggaaggtctttaaaataacggcgtacttctgccggagtcactttgatttctcctaccagtttctgctgcatcttctgaacggtcaatccgtcacgtgcattatcacgcagcgtctcacgaatctgggtggaagttttattgaaatactcctccatcttctctctggaaccgatctgctggatgtacatgttggtcatcatatccacacgctggatgatttccgcttcggaaacctcgatactgtccaactttgcctgatgcaggaacaacttctgcacagcaatctcttcaggaattacacaataaggatcgccgtcaaatctgcgtccattatacaaggcatccatacgggcctcttctacatctgatttcaaaatagcttcgtcacctactacccaaactacttcatcaaccacattatcttgtgcataggttgccacattagcaaatattgccaggacaagggtaacaacaaatctaaagttcacaaacttcttcattctttgtatttaataattatatataatcttcttcttacttactgcctgctgatacaagtcgttctttacctgttccataaagctcacccgtttctgattaaccagtaagtctttcacttccgaacgggcaaattcatacggtttctcttcaccaattccgcgataatcgctcacattcaggaaataataataggccgtatctttcaattctacctgacggtgtttgtctacgtactcttccggtgcctctacttttaatggaatcatatccagtacatcagtcacggacacccatttgtcatagaagtattcgtatttcactgcattctgcaagctatatttttccaggctctcgacagcatcctgtttttccgacttataccacctgcgcacattgttcagctggggagccgtcaacggcactttgataaacaatcccttaatcaacggggtttccagcttaaacagttctttgttttttccgtaatattctgcgatctcttgttcggaaatatcattcgacagcttctggtttatcaactcctgctgataagtatgcataatcaacgctttccgataattctccactagtttgtctacatccacattatcgggaatattgttcgcagctttctcatataataaaatctcttccgcccaactacgaatataatgttcggtgaagagaatactatcatcttttgacaatccgaccggaagcacggacatcaaatcttctttatataaaaagttaccgtccacctctaccaaaggagtctttcctttgtggtcgcgctgttccttgcacgctccacaaccaagaagggtaatcagtaagaggactaatattcgcattggcaactaaaatctacttatttaaggtacgaagatagtgaataatcggttacatcagttattattaactgtttttaaaacctcttggtttatttcaaccttaccaaactccctcaattcccgcgcccagcacgtgtcaagatagcttcgataatcctttcgcacctgttcaattacttcccgataatcatccggtcctttcattttttcgcctacaacaatggtaaaaggataagacattacgggttcgaaaccacccttcttaaaaaccagtttatctatatatttattgtctccgtcggcaaaaataccttgttcaacctgtatcttttccgtcccggatgtattaaaagtttgccgaagctggtccgcccactctttttccggcactttcttcagcatttttttagcttgctttgccgtctttttatcaacgcaatgaagcacgactcctctataccggggactctcccaccgataatccgacgaatgaaatttgaaataggtagccaatccggcccggtcattaatggcaggcaactctattttctgccgtgtgatttcttttaccaaatagttttcgtcagattcccgcaaggcaacacgaatttccggatgctttttatctatattccggctttcataatccaataatgatttagcaataaacccttccaactggcgtttgacagcttgaggatgagaagaggcaaaacgcgtgaacatagctccggtatatgcctgtccatcaatcgtaaagagattttgttctgtccggcctttcgttaacagttcttccattgctgcctgattcggggtatactgccatgacctttttaatcggtcgagcatcgctgccgtgcctttgtctaaaatttccttacgccgtaaccgctctatcaacctgccactgacattttcataagcaaatgcttcctcccggtcaatcactttcaagatatgaatcccttcaggagtgaagaatggctgtgataccgcagctttcgccaaagagaaagcgacatcctcaaattcactcgttgtctccagaccttctatccatctactctgcttatcatccgaatagatttccaccaaacggttaaaattcaaatccggctgattctgtatcacccggtatatagaatccatccgggctttttcttcttccaaatgacgggaagtcaccgtctgcggtaaacgtttaaaaatttgcatgacttgcacccggccgttacgtgctttcaatcccatcttctgatacaagacacgggcacaactatccatcacttgtttgtcaatcagataagattctaccaattctgtccgacgcttctcgtgttgtttacggaaaactgcagtcgtatcaagtccggcagccctggctgcttccaccttcaactttgattgagcgaaaagtgccgcatactcttttggtgaaagctgggcatttgagcgttctgcataacggcggtatgcattttcaaattccgaacggagtacctctcttccgttaacacgcatcaataccggatcttcttgcgcaaagaccgcgacaacaaagagagaaatacatcccaacaacaggcttcttttcatcatcattttttattttccaaacaataaacaacaaacatcacagaggcaataacagataaacaacaaacggtgagcagtgaacaccttgctgacaatacagcctgttcaccgttcaccgttaatagttcaccgtatctatctattattccggacggctatagttaggcgattcactagtaatcgtcacgtcgtgcggatggctttccattacacctgcattggtaatgcgggtaaacttagcatcatgaagtttatcaatattggcagcaccgcagtatcccatacctgcacgcaaaccacctgacaactgatagacaacctcgaaaagtgtacctttataaggaacacgggcagcaattccttccggaaccagcttcttcacatcagcagttccgctctggaagtaacggtctttcgaaccgttctccatcgcttccaacgatcccataccacgataggatttgaatttacgaccattgaaaatgattgtgtcgcccggagactcttctgttccggcaaccaacgatccgatcattacacaatatccaccggcagccaacgctttcacgacatcgcccgaataacgcaatccaccatcggcaatcaagggaatacctgtacccttcaaggcttttgctacatcatagacagcagacaactgtggaacacctacaccggcaaccacacgagtggtacagatagaacccggaccgataccgactttcactgcatccgctcctgcttctaccaaagcttttgcagcttctccggtagcaatattacccactacgatatcaatgttcgggaagcgtttcttagcttctttcagtttttcaatcacaaacatagagtgtccgtgagccgtatcaatcacaattgcatccgcaccggcatctaccaatgcttgcatacgatccagcgtatcggcagtcacacctacaccggcagctacacgcaaacgacctttggcatctttacaagccatcggtttatcttttgcttttgtaatatctttataagtaacaagaccgatcaactttccgtccattccgacaatcggaagtttctcgatcttatgtttctgaagaatctgtgcagcagattctagatcagtagactggtttgtagttaccaatctttctttcggagtcatgacaagatcaatatgtttagccatgtctctttcgaaacgcaaatctctgttggtaacaatacccaccaaataaccttcatcatctaccacagggataccaccgattttatattccgccatgatgtccagtgcatcctgcacagtagaacctcttttaatagttacaggatcataaatcataccattttcggcacgctttacaatagcaacttgtcttgcctgttcttcgatagacatatttttgtgaatcacgccgataccaccctcacgagcaatggcaatagccattttcgcttcggtaaccgtatccatggcagccgtcacaaaaggaatttttaactcaatgttttttgaaaacttagtcgagagatcgacagtgcgcggtaaaacttcagaataagcggggatcaacaatacgtcgtcgtaagttaacccatccattacaatcttatcagcaataaatgacatagggctatgcgtttaaaaattattgcgtgcaaatatacggtttttattcaaaactgcatacctgcacgcttatttttttcgcttttttaattggccatttcagagatgaacttaatacgtaccaagcgaacttcctcttcagtgaagtcatcgcctaattcatcaagcgcatcatcaatcttatcagtggtagattccttgaaataatcatagatatcgagcatgtgatcttcatccatgatttcttccaggaaataatcgatattcagtttggttcccgaatagacgatagcttccacctcatccaggagttcaccaaattcgatacctttggaaagagcgatatcatctaacgccactttacggtcaattgcctgaatgatagccactttcatctttgatttattggcaaccgtacgtacccgcaaatcttcaggacgttctatttcattctcttcacagtggcgtttgattaatttacagaactcttcaccgtaacgctttgcttttccggctcctacgcccggtatattctgcaactcatccaatgtcaccggataaatggtagccatcgcttccaaagacggatcctggaagatcacataaggcggcacttccagtttcttcgagagtttcttccgcaagtccttcaacatagaataaagagcagggtctaccgcacaggaaccaccgccacgtgccggaacttcttcttccgtctcttcaaagtcgttgtcttcggtaatcttgaatgacttcggcttcttcaagaacttgtgtccttcctccgtcactttcaggagtccgtaatgctccacatccttgctcaagtaacctgcgatcagtgcttgacgaatcactgcgttccatgttttatcctcttcccccataccggagccgaagacttcgaggtcttcatgcaaatgcgcctgtacttcggaagtttctttaccttgtagtatgtctataatataatctgccttaaaattttctttcaccgcgataatcgcttcaatcacggcacacaataactcttgagcctccacttgttttttagggtttaaacagttgtcacaatttccacaattttcttccgtatattcttcgccgaaataatgcagcaacgtcttgcgccggcatacggaagattcggcataagcagcggtttccaacagaagctgcttgccaatttcctgctctgccacaggttttccttgcatgaacttctccagtttctgcaagtctttgtttgtataaaaggttatgcactgaccttcaccgccatctctaccggcacgtccggtctcctggtaatacccttccagactctttggaatatcgtagtgaatcacaaaccttacatccggcttgtcgattcccataccgaaagcgatagttgctacaataacgtccactttttccatcaggaaatcatcctgattcttagtcctcgccaacgaatccatcccggcatgataaggacgcgcattgataccgtttgcctgaaggatttcagcaagttcctctacttttttccggctaaggcaatagataatgcccgatttttccggattgtttttgataaacttgataatatccctgtcaatattagcggtcttcgcgcgtacctcataataaaggttcggacggttgaacgacgatttgaaaacttgagcatctaccattcccagatttttctggatatcatgctgcacctttggtgtcgctgttgcggtcaacgcaatcaacggagcctttcctatttcgttgataatagggcgaatccgccggtattccggtcggaagtcatgtccccattcagaaatacaatgagcttcgtctactgcatagaacgaaattttcaccgaacgcaaaaattctacattttcttctttcgtcagcgattccggcgctacatatagcaattttgtctttccggcaaggatgtccgacctcacttggtctatcgcgcctttgtttaatgaagaattgataaaatgggcgacgccatcttcttcactgaaattgcgcattgcatccacttgattcttcatcaacgcaataagcggagaaattacaattgccgtaccttccatcaagagcgaaggtagctgatagcataaagatttcccgccaccggtaggcatcagtacaaaggtatctttaccatcgagcaagttgttaatgatcgcttcctggtttcccttgaacttattaaatccgaaacacttcttcagttcatctgttaaattaatcttccttgccatcttaacttaggttgttttattcagttcatggtttaactttagtaggctccctccttcaagagagccaaacaaagttataaacaacttcgtaattaccaagcaaaatgcgactaatatttttaagaaaatacagttacgatcatcttttatagtcttactctctgattttaagcagtttgcagtcttgccatattcgctttttccagttgcatctttgcataatccagcgtcaccttatactcttttttgtcctctgaagggatttcaaacatgacatccatcatgattgtctccacaatagagcgcaatccacgggcacccagcttatattctactgccttatcgacgatatattcgaagacagcatcttcaaatgtgagcttgataccatccatttcaaacagtttgatgtactgcttgatgatagagtttttcggttcggtgaggatagcacgaagcgcatcccgatccaacggattcaaataggtcagtaccggaagacgaccgataatttcgggaatcagtccgaatgacttcaaatcctgcggagcgatatactgcatcatgttattcttgtccaccgtcgctgttttctgcgacgccgtatatcctacgacatgtgtattcaaccgttgggcgatcttcttttcaataccatcgaaagcgccgccacagataaagagaatatttttggtatttaccggaatcatcttctggtccggatgcttacgaccaccctggggaggtacgttcacaacagaaccttcgagtaatttcagcaatccctgctgtacaccttcaccgctcacatcgcgagtgatggaagggttatctcctttgcgggcaatcttgtcgatctcgtcgataaacacaataccctgttccgcttcaggtacattataatctgccacctgaagcaaacgggttaaaatactttcgatatcttcgcctacataaccggcctctgtcagcaccgtagcgtctacaatggtaaacggcacgtgcagcaacttggcaatcgtacgtgcaagcaacgtttttccggttccggtactacctaccataataatgttcgacttttcaatctccacatcatccccgctgtctttttgcaacagacgtttataatggttatagaccgatacggaaaggaagcgttttgcgtcatcctgtccgatcacatactggtcgaggaatttcttgatttctaccggtttgggcagttcttttaaattaagtttggtagctcccgcgcttttcttgccttcgcccaatgcttcctgagtaatctcataagcctgggtagcacaactgtcgcagatatagccgttcattcccgtaatcaggaatccgacttcattctccgaccgtccacagaagctacaccttttctttgtctttgaatcagccatttttatttcttaatcaatacctcatcaatcataccgtattctttcgcttcctgag

SEQ ID NO: 8258 - DNA, 10538 bp, Unknown
  gut microbiota DNA sequence
tcagggcgcaaattcagattaccgttttttcgtagggcgttgccctacgctatataattaagccctttcagggcactccgcaaaattatcatttagctcatttccgtacagaaatgaactataatagattaccggcttatgtagttaatcaaaacaaaagaagtaaacgttaagcaattttaaaaagaccacttctttttaggaaagaccttctaatggcctgtcttttatatgtatttgtcgatacacaagactatacaaaatcaggtagaaaaagtttgaatcattttctacctcataatagaagtttatgatgaaaatatcagttataaatataaatagttggctaattaattactatttttgacacgtaaatgaaaaacagcgaataacccctattaaaaacttaaaatatgatgaagaaactactcacagccactgctatcggcttggctttgttaacttggcacaccagttgtactcaacaaccaaaggctccggaagcctttactcctatcaaagtagaaactcctgcccgccctgccggacaagaagatgtaatccaactcgttactcctaaaattgataccgtacgtgtcggtttcatcggcttaggaatgcgtggtcccggcgccgtagcacgctggactcatattccgggaactaagattgtagcgttatgcgacctgcttcccgaacgtgttgaaaaatcacaagaaattttgaagaatgccggactccctgcagctgcttcttacagcggagaggaagatgcatggaaaaaactttgcgaacgggatgatattgatcttgtatacatagctacagactggaagcatcatgctgcaatgggtgtctatgccatggaacatggcaagcatgtagccatcgaagttcctgccgctatgacattggatgaaatctggcagttaatcaacacttctgaaaagacccgcaagcattgtatgcagctcgaaaactgtgtatatgacttctttgaactgacttctttaaatatggcacaacagggcgtattcggagaagtgcttcatgtagaaggttcatatatccacaacctggaagatttctggcctgaatactggaacaactggcgaatggattataatcatctgcatcgcggtgacgtatatgcgactcacggtatgggccccgcttgtcaggtacttaatatccaccgtggcgaccgtatgaaaacattggtatctatggatacgaaagctgtcaacggaccggcttacattaagaaacaaacaggagaagaagtgaccgacttccagaatggtgaccagacttcgaccttgattcgcacagaaaatggcaaaacgatgctgatccagcacaatgtaatgacaccccgcccatacagccgtatgtaccagatagtgggagccgatggttatgcaagcaaatatccgattgaagaatattgcctgcgacctacacaagttgattctaaagatgtgcctaatcatgaaaatctgaatgcacatggctctgtatccgaaaatgtaaagaaagccttgatggacaaatataaagatccgattcacatagagttggaagaaactgccaagaaagtaggcggccacggtggtatggactttatcatggactaccgtctggcatattgcctgcaaaatggattaccattagatatggacgtttatgacctggcagagtggtgttgcatggccgaacttaccagactttccatcgaaaacaattctgctccggtagaagttcccgatttcactcgcggcggatggaataaagtacaaggctatcgtcacgcttttgcaaaataaaactgaatatatccttttagcacgaacataatgaaccaatccggcttctcccccaaagccggattattcatgggttcgtgtttgaacattttatagattatcataatcacttttatgaaaacagctattccaaaaccttctaagcaaagcattatccgtgaagccagagattatgtaatgattgccatcggcatgattttgtatggcatcggttggaccgtttttctacttccgaacgatatcactaccgggggagtaccgggtattgcttctattgtatattgggctacggggtttcccgtacagtatacgtacttcagcatcaacttctttttattgctactggccctcaaattgctggggatgaagttttgcattaaaactatttttggagtatttaccctcaccttctttctgtccgtcattcaaaagctgacagcaggtttcggactccttcacgaccagccctttatggcatgtgtcattggagcatccttctgtggaggtggtataggagttgctttttcggcaaacggaagcacaggaggcacggatattatcgcagccatcatcaacaaataccgggacatcacattaggaagagtcgtactcatctgcgatatgattattatttcttccagttattttgtcttaaaagactgggaaaaagtggtgtatgggtttgtaactctttatatttgtagcttcgttctcgaccaggtagtgaatagtgcccggcaatccgtacagttctttatcatatccaataaatatgaagaaataggacggcatatcaacgaatatccacaccggggagttacgattatcaatgcaaccggcttttatacaggacgagaagtaaagatgctgttcgtattagccaagaagagggaatcgcctatcatcttccggttgattaaagatatagacccgaatgcatttgtgtcacaaagtgctgtcatcggagtttatggagaaggattcgatcatattaaagtaaaataaaaaagaaatgaaaaaccaatattgagaaacatgaaatttcgaccaacccccaatttattaacaggcattttcatgggaatattttccctgacaacatttaatgtaatggctgaaaaagccgtgaaaccctattggcaggatgtgcaggtagttgaagtcaacaaagagtatccacgcacttcttttatgacatacaacaatcgcgctgatgccttgagtggcaagttcgaacgaagcaagtattaccgcttgctgaacggaacctggaaattctactttgtaaactcttacaaaaagcttcccgacaacattactgacccgaatacgaatacagattcgtggaatgatattcaggtacccggcaactgggaagtacaaggacacggaatagccatctacaccaatcatggttatgaattcaagccacgcaatccgcaacctccggctcttcccgaagcgaatccggtgggagtttaccgtcgggatatcgatattccggcagattgggacggacgggacatctacctgcatctggcaggagccaagtccggcgtatatgtatatatcaacgggcaagaagttggatatagcgaagactccaaaaatccggcagagtttcttattaacaactatgtgaagcccggcaaaaacgtgcttaccgttaaaatcttccgttggagcactggttcctatctggaatgtcaggacttctggcgcatgagcggtattgaacgcgatgtttatctatattcacaacctaaagcagccctcaaagatttccgggtgaagtctaccctggataacagctacaagaatggaatcttcagcttgaatgtcgatttgagaaatcacgagaaggcagcaactaatctcacattagtttatgagctattggatgcacagggaaaagtaatctctactgaagagaagaccgcctatatcccatcggacgaagtacgtacactttctttcgatcagaagctggcagatgtcaatacatggacatccgaacatccgaatctgtacaaactgctgatgaccgtcaaagagaatggcaaaataaatgagattattccttttaatgtaggattccgccgtattgagatcaaacctatcgaacaaaaagctgctaacggaaagccatacgtttgcctgttcatcaatggtcagccactgaaactgaaaggggtaaatatccacgaacacaacccgtcaacaggtcattacgtaacagaagagttaatgcgtcgtgacttcgagcttatgaagcaacataacctgaacagcgtacgcctctgccactatccgcaagaccgccgtttctacgaactttgcgatgaatacggtctttacgtatacgatgaagccaatatcgaaagccacggaatgtattacgatcttcggaagggtggttcattgggtaacaatcccgaatggctgaaaccacacatggaccgtaccatcaatatgttcgaacgtaacaagaactatccgagcgtcaccttctggtcgttgggaaatgaagccggaaacggatataatttctatcagacttacttgtggctgaaagaggctgacaaagagctgatgaatcgccctgtcaactatgagcgtgctcaatgggaatggaactccgatatgtatgttccgcaatatccgggtgccgactggctggaaaatacaggaaagaacggcagcgaccgtcctgtagctccttccgaatatgcacacgcaatgggaaactccaccggaaacctgtggggacaatggcaggcgatttacaaatatccgaacctccagggtggatatatctgggactgggtagaccaaggtcttctccagaaagatgagaatggaagagaatactgggcttacggaggtgacttcggtgtagacgcgccgagcgatggcaacttcctctgcaacggtcttgtcaatccggatcgtggtccgcatccggcaatggctgaagtgaaatatgtacatcagaatgtaggctttgaggcagtagatgccgctgccggtatattcaaaatcaccaaccgtttctatttcaccaatctgaaaaagtatcagattcactataacgtactcgctaacggaaagactataaaaggtggaaaagtatctttggatattgctccgcaggcatccaaagaattcaccgtaccggtaaacggcttgaaagcccaaccgggagtggaatattttgtaaacttcagcgtaacaaccacagaagctgaaccgttgattccaacaggatatgaaatagcatacgaccagttccagcttcctatccaggcagagaaagctatttataaagcaaacggtccggcactgaaaacaacgactcaaggagatgagctaatcgtttcttcttccaaagtgaactttgtattcaacaagaatagcggattagttacctcgtataaagtggacggcacagaatatttcaaagacggatttggtattcagcctaacttctggcgtgctcctaatgataatgattatggtaatggcgctcctaaacgtttacaggtatggaagcaatcaagcaaaaacttccacgtaacggatgcaaccatgacaacagagaataaggtagtttccttacatgtgacctacttattggctgccggcaacttgtatgttgtcacgtacaaaatctatccgaacggagtagtcaatgtaaatgccaaattcacgtcaacagatatgcaggcaacagaaactgaagtttccgaagctacccgcatggctacgtttactcccggaagtgacgctgcccgcaaggccgcttccaaactggaagttccccgcatcggtgttcgtttccgcttgccggcacagatgaacaatgtacaatactttggccgtggtccggaagagaactatatcgaccgtaatcatggaaccctcgttggcgtatataagacaacagcagataaaatgtacttcaactatgtacgtccacaggaaaacggacatcacaccgatacccgttggatcgctttatctcccgccaaaggaaacggcctggttttggtagccgacagtacgatcggtttcaatgccttgcgcaactctatcgaagattttgactctgaagaggctctgccccacccttaccaatggaataactttagcccggaagaagttgccaatcatgatgagaatgccgcccgtaatgtattgcggagaatgcatcatgtaaacgacatcgttccaagagatttcgtagaggtttgtgtggacatgaagcaacaaggtgtaggcggatatgacagttggggtgcacgcccggaacctttccaccaaatccctgccaatcgtgattaccattggggattcacattagtacctgttcgctcggctaatcaggccaacgaggcggctaaatacgattatcgataaccttagtataaatttttaaagaaaaaacccatgaaagatttatctagcattgtagctaattttaaagtccaaggtacgatagaagaaatcaaacctttgggtacaggacttattaacgacacttacaaagtaaacaccaaagaagcagatgctcccgactacgttttgcaacgcatcaatcatgccatttttcagaatgtagagatgcttcaatccaatattaccgctgtcaccaatcatattcgcaagaaactaacggaggcaggagaatcggatatagagcgcaaggttttgagtttcctcgaaacagaagagggtaaagcatattggttcgacggtgatagctactggcgtgtgatggtattcatcccacgcgccaaaacgtatgagacggtgaatcccgaatattcaaattatgctggagaagcttttggtaacttccaggctatgttggccgatattccggaaacattgggtgaaaccatacctgacttccacaatatggagttccgcctcaaacaactacgtgaagctgttgcgaaagatgctgccggacgggtatcggaagtgaaatactatctggacgaaatagagaagcgtgcagatgaaatgtgtaaagcagaacgtttatatcgtgaaggaaaactccccaaacgtgtttgccactgcgatacgaaagtgaataacatgatgttcgacgaggatggcaaagtgctttgtgtcatcgacctggatacggtaatgcccagctttgtcttctccgattatggagatttccttcgtacaggcgccaacacgggtgatgaggatgataaagaccttgatcgtgtaaacttcaatatggaaatattcaaagcgtttaccaaaggctatctgaaaggagccaaatcattcctgactccaattgagatagagaatcttccttatgcagccgctttattcccatacatgcagtgtgtacgattcttggcagactatatcaatggagatacttattataaaatcaaatatccggagcataatttggttcgtactaaagcacaattcaaactgcttcaaagtgtggaagccaacacaccggaaatgatcgcattcatcaacgaatgcttaaagagttgagaatagaggaaaaaagagaatggagaattatctatttggtaaaggctccattcttccaatgataaacaatcggacggcggagaaacggtttcagtttctctgccgtttctgttgacatataatcaggagtagccaatgtaacagtcaattctgtattttctttattaaaatcggctttcatcaataatatatctgccgaacggcgtgcttcgtcaaactcatacacgcctgctgaatccggcgtattcaaaaagtcgcccatcacaggcagggtaataaagagagatgctgtaagcggtttccagtcatctgtatagaaacggatgctgctgtcgcaggcaggtgcacaagctgtagagactgtacagatcacgttcgtcgagtcattcaaagccaacactttcatctgccaggtagattgagaagacatctgcatacgaatataatctttacttagatcagtcatctccgacttcttgccgaaacgattctctacttgcgctttcatcttactttccagaaagtcaatacaatcttcccggtttactttggttagtaacgggcttagagaatccggcatattcacaaacagcgttttggcttcttgtgcccaaagagcggtcgaagcaaagagtccgacagcagaaaagaatatagtgattacaaatttatttattttcatatctatcttatttaacctgtgacaaacagattttgtgtaactgttttaatttttagaccccaaatataagaatatcattccgattaacaccagtataaggtcaatcgctttgctttttaaattcttttcacggaagagaagtgcaccgaaagtgaaagagactactacacttccccgacggaccatcgaaacaatggaaatcatggaatcgtcatagctcaatgcgtaaaagtaaacgaaatcggcagccgaaaggaagatagaaatcaggataatcgtccagtcccagcgaaacggggtggtagactttcttttaggccaccaaagcaataacagaataggacacataataaacacctgataaacattataccaggattgtaccagcatcggattcagagacttcatcagatacttgtcatataatccgctgatagcacctgtaatggcagccaacacaataaagaatatccatttgttatgtttaaaatcaattccttctttcttccccgaacgacttaacataaagaaagagacaatggccagcattaccccaatccattgatagagattcaaccgttcgccaaataccagcatcgctcccacaagcaccatcaccggacgagtggcgttgataggtcctactatggttaaaggcagatgtttcattccgaaatatccgaatatccacgaagacaacacgatgaacgacttgatgatgatatatttatgctgttcccaaccaacaacgggaacattaaatatcgttcctcccaacaggtccggtttatatacggatatcaggataaacggcagaaagatgagactggaaaaaaatgtatttagaaacaaaacgggaagtaccgcattatctttcaacgatttcttcttgaatacatcataaaagcccagcaaagtagccgagagaaatgctaataataaccacatgagaatatttattatttattattcaaatatactttcgggatattccacatttaccagaaacagggcttgccccggagcagatgtcccggctttgcaacggtcttgttgttcgataacccgccggaagccttcaacagtaagtttccctcgtcccacttcaatcagcgtacctacgatagctcgcaccatatttcgcaggaaacggtcggcacggatggtaaacacccaagtagcatcatcttcctgcgtccattcggcatgagtgatatgacagatattggtctttacatccgtatgaagtttgctgaagctcgtaaagtcagtgtactcgaaaagggtacgtgcagcttcgttcatgagtgcataatccaactgattataaactcgccaacgatattgccggttaaaaggatatttcgatgtcgttacataatacttgtaagttcgcgcagtcgcatcaaagcgggcatgcgcatccggccggacccggcaaacacgataaatggaaatatcgggaggtaacaaacggtttaatttatcggcaactgatatttcatccaacggctcatcgaagtcaaaatgagcaaccatcagggaagcatgtaccccggcatctgtccgacctgcccctattacttcaatttcgcgacgcagaaaggtagacaatgctttcatcagacattcctgcacactaatcccattcggttgaatttgccaaccatgatagttggtcccgtcgtaagccaaataaataaaatacctttgcacgctaattcctcattttagggttttcgcgcgcaaaattaatcattttatctcatttatctttgtataattcacataaacctgtatatttacagaacaaaataatcatgatttactaataccccacaattatgagtagtaccattttcctcatcatcgccctcgtcacgacaggcatctttcttattcaattcgtattatccatctttttcggagatatagatgcagatgtagacgtggatgctgatatcagtagcgtagtttcttttaaaggacttacccatttcggaattggattcggatggtacatgtatctggcgggaaacacggaaattcaaagttacataatcggtattctagtgggtcttttctttgtttttgccgtctggttcctctataagaaagcttatcaactgcaacaagtgaaccacaacgagcagaccgatcagcttgtgggacgggaatgtgtgatctatttcaaacaaagcgacagcaaatatactgtacagaccacccgggacggagccatgcgcgaagtagacgtcatctccgaatccggaaaagcatatcagactggcgacagaacaatgattaccagctacaaagacggaacgctattcattcaataattattcaaatacacaattttatgacacaagaaatgttaatcatggctgctatactagtggcagtcatcctactcacttttattggtatcctttcgcgttaccgcaaatgtaagagtgatgaagtcctcgttgtatatggtaaaacgggag

SEQ ID NO: 8259 - DNA, 10521 bp, Unknown
  gut microbiota DNA sequence
gaaatctgcaaagtctttgcagaactaaatacaactataatatcttgattactaataatatacacgatgtttactttccttcggcaataaatctttcgttgccgttattatgcagattatcaatatgttaaatacctaccaaacgtattaatttgcagatttatgataccagatttctatcaaaaatagggcataaccatctatttattaattatttaagttcttgtcttatatgatataagctaaaacttatttccatcttaactgttgaagatgggtttcttgtctaaattatatccaataattattgactataataatatattcattagcaaacgataatctaagaaaaagaaaaactccagatgaaaaaatgcatattttattactgtatattttaaaatatgcaggggtggattcaaatattctccaaaatcgcagagaatatgattgatgaatattcatattggatggttatatgctttttctgtatcaaagagattgtgtaattacatctaattatgtaaaaagaagtatttatcatttatctgacgctaaaatgaaagaaccccaaatgccggattctaatagctattagaggctatcagggttataaattagcttttaatcctttccttttaaagaaagcaagggcttctctacgaccaatgactcgttccttttaaaggaacactttattcctttaaatgggacgagtgataatattcgtaataacgatgtgtatttaggttatgtatatgcgtttttgaaactgatattgcatattctttcatttaattatacacttttctttctattagagaaaattagcccctccatttctaaaactaaatcttaaaaacagaacactttcatctagcttttgtacctattattattttttgatgaggccgttttctcaagatcacgtaccactgttatatccattatatttgcatatacctgtgtagtcttcacacttttgtgtcctaatagcttttgtaccgtagtaatattggcaccactatataataataaggtggcatttgtatgccgggcggtgtgaaatgacacacgtttatctattttcgccaagcctgctaataaattcaattctttgttgatattagaattgtctttcaacttaaagaagctgtcaagatcatctttatagcgttgcaatatctcaattcctttgccttcaaataacaaatataaaggaagacgtacttcaataccagttttaacagacttgtatataatccaggtttcctgatggaattcaacaatatttgcggaggtcagactggtgaaatcagaatatcgtaaccctgcgtagcaacaaaataaaaaagcatcttttgttttttgtagcctcgtatatcttcctgttagctgtaaattttcaaagcgatataactcttccggagccaggtgcgtatgacttccctctatacttttaattttatactttctaaaagcatacttttgtatatccatatattccttatttatagcaacgttaatatatcgttttagatgcttcatgtgcttggcaatggtattaaggtgatagcctttagactgcaggtgattatcaaatgaggacacaaattcaaatgtcaaatcggtgaataatatctctttcttaaattcctgaagtaattcaagagtggaaagatgattttgtctggtactctctttcaaaagagaattagctacttcttctttgaagaaagttaagaatgagctcccgttacttagaggcttatcaatcgaattctttaataaatctagcgatattggttttccttgttgccataatccaagttcagtatgctcaatagctgctatattctcatacaacatacgattcaaaacattggcattaggatgattcttcaccatctttcgtttggcatcccactgatcgggtttgagatatattttggtggagaaatacattttttttctgttcagataggcctctacctgtactaacgccattccttttttattcaatctcttctttctgttaaacacaaggttgtaactgatcttttccatactttcatttttaaattaataatagaacaaattagacgtaattctgtgctatatcagagacgaataagcattaatatctctaaaaataaatcttcaaataatatagtattcacaaaactttaaattaaatgccacttttttattcgcttttccacgaaaaaagcaaaaagaacagcttttaaaggtgttttatgactaaaaacgagtaaaagaaatattaaaagatgcattttgctcatacaaagtgttactagctattttagtaatcaacgcttttaataagaaaaaacatgcttatcgacataaatacagcatacaaaataacaaaatgttatatttgcaacctttttttattaatataattgttagtttcagttttattaatatatttgcaaattgttagagtaaagatacaaataatgtaaagttaaactttaagagagaatttatgaaaagaaaattgatgctgttattggcatgcctttttgtgggcataggtctggtaactgcccaaactcaaaaaatcacaggcgttgtgatttctgaagaagacgggcagccagttgttggcgcttctgtgttggtaaaaggtaccactcaaggtacaatcacagatgtagatggtaattttaatttgtcgaatgtaccaagttctgcaaagactttgcagatttcgtatattggtatgcagacgcaggaagtggttataaaaccgaatctgaaagttgtgctaaaatctgattctcagaaacttgatgaggttgtggtgactgcgatggggattaaacgttctgaaaagtctttgggatattcagtgacaagtgttaaaggtgatgaaataaccaaggcacgtgaaagtaatgttttaaactccttatcaggtaagatcgcaggtgtacagattggacagtcgtcaggtactgcagggggaagttctagtattcagattcgtggtgcttcttctattggtagcgtgtcgtctccactttttattgttgatggtttgcctattgacaatggggcgttcaatccggacagaactaatggcattgttgatgttggaaaccgtgcaggagatattagctcggatgatatcgagtctattaatgttttaaaaggggctgcggcaactgcattgtatggtgcgcgtgcgaaagatggtgctatcgtaataactaccaaaaaaggtagtcgcaattcgcaggtatctgttacagttaattcttccacacgttttgagaatgttttgaaactgccagattttcaaaatgattacgcacaaggaagttatggcaaatataatgtaaaaatgttgaatggttgggggcctaagatatcttctgtgcaagatcagacatttgcagattttaaaggagaacaggttactttgcaagcatatcctgacaatgtaaaagatttctatgagacaggtatgagttatataaataatgtcgcaattgctggtggtacagaacgttctgattttagaatcagtgtctctactactaatcagacaggggtggtgcccggatccgattataataaatatgcttttgccgttaatggtggtatgaatttcaccaagaacttcacagggcgagtttcagcacagtacatccgctctgattcggaaggacggcctgctcagggatctaatgataataacttgctcattcctttgataaacggaatgccgcgtacggtaaatatcaacgatgtgaaaaacaattggattgacgaatacggtaagcaaatatcactggaaccggaaggaaagagtaacaatccgtattggataatcaacaagaataaatttactaatcagttggatcgtcttatcggcaatattgttttgacttataaaccgatagaaggactgacaatctcgaataatgcaggaactgacttttatacagaaaccagacgtaaagtatattcgaaagggacaattggtaatcttgaaggacagttccagacatgggatctctataagcgtattttgaataatgatttgatgatatcgtatgagaaaacatttgcggaagattatggagtaaaagtaatgttgggacacaatatatatcaggaagactggagaaataataatgtgttggcgcaaaatctggttgtagatgaattgtatgcatatactaatgctaagacaacgagtccggtaaattatacctctaagaaacggctggttggtctttatggagatataagcttcagttataagaatatggtattcttggatgtgacaggaagaaatgactggtcatctacattacctgtaaataaccgttcttatttttatccgtcaattagtggtagttttatttttacagaattgatgaagaataaggatgttttgagttatggaaaattgcgtatgagttatgctaatgtcggtagtgatgaacaaccataccagttggcgtttcaatatactccggttaattcttattttttgcagtataatttaacgaatgtttttccccataatggattagtaggatttacaggtcctcgtgtattgccgaatgagaatcttaaaccacaaaatcaggcatcgtttgaggtaggtactgatttacgctttttccaaaatcgtattcgtttagacttgacttattataaaagtgtaactaaaaatcaaatcgtaagcattgatgttcctttgtccacggggtattttgccaataatattaatgcgggaaaagtatctaataaagggattgaagtagcattaggagttacccctgtacagactaaggactttaaatgggacttggaggctacttttgcaaaaaacacccagaaagttgatgagctggcagaagggttggatgagtactcgttgactagtgggttgagtggattgcagataaaagcggaagttggtggttcgtttggtctgtatggtacaggttggaaacgtgatgattcgggcaattatgttattaacgaaaagacaggactccgtgaaattgtaaacaatgtgcgtttgggagatgtttacccggactttacaatgggtattaataatacgttctcttacaaaggtttcacattgagtttcctgatagatattcgtcaaggtggttctctttactctgaaacagtgggtactttacgtactaccggacttgctgctgaaactgctgctcatcgagaagatgcgtcgtttattgaaccgggagtcatcttacaatctgatggaacttacagagctaatgatgtgccggttaaaagtatgcaagattattgggggcatgtggcaaaatcaagtaataatgagggtaatattttcgatgcttcatatgttaaattacgtgagttgaacttttcttatagttttcctagaaaatggttcagaagtttctttgtcaaatctcttgatttaggctttgaggctcgtaatctttggattataaaagatcatgtgcctcacattgatccggaagctaacttttttggacctgcacagatcggtgggggagttgagttcaatagtatcccgacaacaagaagtttcggatttaatattagattgacattataataattatcaaagagaaataatatgaaaaataaaagatcaatatatactatagcaatcatatttacatgtgctattttgagctcatgtagtgattggttggatgttaatcataatccaaattctgcggaaaaggtggatcccggatatttattcaattatgcagtagtgaattgggctggtagtcgtaccggaggagatgcttacattcctctttctcaaagtatccagtgtcaggcagacggcggcgatgattatgggggctgggcggaaggttattatgtcatagatccatatagccttggtaatacatggaagcattactattctgttggaggtaataatttgcagttagctatcaaaaatgctcaagaagctactcctgtcaatcataatggaattgctcaatgtaaaattattctagctcaacatatttatgagacaacaatgatatggggagatattccatttacagaggcttgggtagaaggagttaagtatccaaaatttgattctcaggaagtagttttgaatggtgtagtaagcttgttggatgaagcgttgaatgagatcaacttggatgatcctttggccattactgattacgatattttttataaaggtgatatgcaaaagtggattcggttggccaaatctttaaaattcagaactttaatgacaatggtggataaagatccgacgaaagcagaacagattggaaagttgataagtgacggtggtatgattagttcggctgatgataatctgcagttcccatatttacagactgccggtaatgaaaatcctaaatataaaatattggagaagtatacaaatggcatcaatattatgttttttgcaaataataatgtattgaagcctatgcaggaacgtaatgattctcgtatttccagatattttgaaccgggagctgacggggtgtatcgaggcttggatactcggcaggcagcagaagaaactgatgatgaaaatgcggatttattatcttccgttataagtaagtatctttttagaaaagaggcacctgaattaatttattcttatcaggaacagttattttttgaagcggaagcgtatgtacgtgggttgggagtaacttctaatttggtgaaggctaatgaattatataagaaagctattcaaacagcttgtgattattatgaagcagatccggtaaagacaactgaatttattgatgctttggatgatttaaacacattggaacctgatagagctttatatgagattcatattcagcaatggattgatttgatggacagaccgttggaagaatttgtacagtggagaagatcaggatccaatggtaacgaggtacctgtacttactgtgccaacagaagctacttctcgggaacttattcgtagatgggaatatagtcctgaggaaatgactgctaatcctaatgcacccaaagaatctcctaaaatttgggaaaagatgtggtttgatttatagattctaaggtgataaatgatacgaaaaagaggacaataaaacattgtcctctttttttttgttatatttgcgcccacattattatatatagaagtaaagaatgaaagaatttgtaatatccgaagccaaagtagagacagcagtgcttgtcggactcatcacacaaacgcaggatgagcgtaagacgaacgagtatctggatgaactggctttccttgccgagacggctggggcggaagtagtgaaacgatttacgcagaagttgccgacagctcattcagtgacttatgtcggaaaaggaaagttggaagaaatcagacaatatattcgtaacgaagaggaagaagaacgtgaagtaggaatggtcatctttgatgatgagctttctgcgaaacagattcgtaatattgaagccgaactgaaagtgaagatactggaccgtacttcactgatccttgatatatttgccatgcgtgcacagacagccaatgcgaagacgcaggtagagctggcacaatataaatatatgttgccgcgtttgcagcgactttggactcacttggaacgccagggaggaggttccggtgccggtggcggtaaaggttccgtgggacttcgtggtccgggtgaaacacagctcgagatggaccgccgtatcatcctgaaccgtatgtcattattgaaagaacgtctggcggagattgacaagcagaaagctacccaacgaaagaatcgcggacgcatgatacgtgttgcactggttggttataccaacgtgggaaaatcaaccatgatgaatcttctctccaagagcgaagtgtttgcagaaaacaagctgttcgcgactttagacaccactgtacgcaaagtgattatcgataatctaccgttcttgttgtcggatacggtaggatttattcgcaagttgcctaccgacttggtagaatcttttaaatctaccctggatgaagtgcgtgaagcagatttgcttgtacacgtagtcgatatttcccaccccggatttgaggaacagattgaggtggtgaacaagacactggcagagattggcggcagtggcaaacctatgatacttgtatttaataaaatagacgcttacacctacgtggagaaagcgccggacgaccttaccccccgaacaaaggaaaacttaacactcgaagaactgatgaagacgtggatggcaaaaatggaggataactgcctctttatttccgcccgcgaacgaatcaatatagacgaactgaaaaatgtagtttatcagcgagtgaaagaattacacgttcagaaatatccctataacgattttctttatcagacctacgaagaagaggaagaataaacgggagggatttatgatttctgatttctgaattatgagttggctgtgcgattctgacggacaacaattcacagttcataaatcagaactcataaatcataactcataaatcatttagtatatgaaagactatcgtagattgactgaagatgaggtacttcagttgaagagccagtcgtgtctggccgatgattggggaaatgtatcagtggcagagggctttaattgtgagtacgttcatcatacccgtttctcgggtgaagtgaaactgggggtatttgaatcagaatttacattgccggggggaatcaagaaacattcgggattgcgtcatgtgacgttgcataatgtatcagtgggcgataactgttgtattgagaatatccagaactacattgctaactatgagatcggtagtgataccttcattgagaatgtagatattattttagtggatggattaagcactttcggtaatggggtagaagtggctgtcttgaatgaaacaggaggtcgtgaagtgttgatgaacgataaactgtctgctcatcaggcgtatatacttgcgttgtatcgccatcgtcccgaactgattaaccgtatgaaatctattgcggattattattccaataaacatgcttctgccgtcggcagtattggcaatcatgtcatgattctcaatacaggttcaatcaagaatgtccggattggtgattactgccatatttgtggaacttgccgtttatccaatggaagcgtcaatagtaatgtgacagcgcctgtacatatcggtcacggggtaatttgtgacgacttcattatctcttccggttcaaaagtggatgacggtacgatgctgacccgttgcttcgtcgggcagtcctgtaaattgggacataattattccgcttccgattctttgttttttagtaattgccaaggagagaacggtgaggcatgtgctattttcgcaggtcctttcaccgtgacacatcataaatctactttgctgattgccggaatgttctcgtttatgaatgcaggttcgggatccaatcagagcaaccacatgtataagttaggtcctattcatcaaggaacaatggaaagaggagcgaagaccacttctgattcctatatcttgtggccggcacgtgtcggagctttctctttggtaatgggacgtcatgtcaatcatgccgatacttctaatcttcctttctcttacctgatagagcagcggaatacgacttatctggttccgggagtcaacttgagaagtgtaggtactatccgtgacgcacaaaaatggccgaaacgtgataatcgtaaagacccgaacaggctggattatatcaactataacctgttgagtccttataccattcagaagatgttcaaagggcgttccattttgaaagaattgaaacgtgtgtccggtgaaacttcagaaatctactcttaccagagtgctaaaatcaagaattcttctttgaacaatggaatccgtttttatgaaattgctatccacaagttcttaggaaactccattataaaacgactggaaggtattaacttccaaagcaatgaagaaatccgtcaacgcctgaaacccgatacggaaattggtatcggcgaatgggtagatgtttccggactgattgctcccaagagtgagatcgaccgattactggatggtattgagaaaggagcagtcaatcgtttgaagtctatcaatgcaagcttcgcggaaatgcacgagaattattatacttatgaatggacatgggcttatcataagattcaggaattttatggcttagatccggaaacgataacagcgcaagatatcatcggtatcgtgaaagcctggcagcaagctgttgtcggattggacaagatggtatatgaggatgctaagaaagaattctcgttatcttctatgaccggattcggtgctgatggctctcatgacgaaatgaagcaggactttgagcaagtacgcggtgatttcgaaagcaatacatttgtgactgcg

SEQ ID NO: 8260 - DNA, 25682 bp, Unknown
  gut microbiota DNA sequence
ctgtgcacgttcttccacagtatcgacgattcgggctacatcacgcaaaaagacatttgccccattatgcgtacctaccactacgtctgccaactgtcgggaatcatcgaactcaccttctacacgcaacgcgtatgtttcactaccgatatcgaagttaccaccgggaatgttcttgttctcggcaccgataatggaactgattgtttcgatagtcaggtgataggcttccagtttattggggtcgcaatagacctgaatctcacgttgcggcgcaccactgatagacacggttccgactcccggaatacgtgccagcgggtttaccacacggtcgtccaatatcttataaagggctgactgactttcattggcctgtacggaaagcagcacgataggaatcatgtccgtactaaatttgaagatgatcggattctcgacatcatcgggaagctgcgaacttaccatgtcgagcttatcacgcacatcattggtcagaacgtcaatatcgttaccaaactcgaactccaatgtaatcaatgacatattctcggaagaacgggaggtaatatgtttcaggttgctcaccgcgttcaacgtattttcgagcgggcgagtcacattattttctatatccgaagcacttgctccgggataagcggtcattaccatgattgtattcgtgtcaatgtccggatacaagtcgataggtaacttggacaaagagaaaagaccaaaaatcaccactgccaggaagcagagggaggtcataatcggtttcttaaccgcgccttcgtataaactcatgttattttatttaaaagcctctccctgctcctctccccaaaagagggagccggaagatcgttttgaaatcaagttaattaataaatgcatcgggcgaaaggtactgaacatctcttatttggaagaagactgggaagaggcttccacctctacttccataccattcaccaaacgtgactgtccggcaactaccacctgtgagttatccggtacaccggatttcaactcatactccgtacccatgcgtctacccagttcgaccttattataagatactttaccgtctttataaacgaatacataacggtcaccggaacctgcctgcttaacgattgccaaatcgggaacaacgacgttttctgctgtaccgaagttcaatgtcgcacgggcaaacattcccggacgcacacgctggtctttattatccagtctgatctctacctggaatgtacgggtagtggcatctatggtagggtaaatcagattgatggttcctgtaaatacttcatcgccatatacatcgagtttcacgtcgacaggagtaccttttttcactttcgtgaagtaggtttcggacacgttaatcaggagtttcaccggagtgatctgttctactacaagtacgggttctccaccgctgtacatatcgccattatcatagttgcgtgcagtgaccacaccgttgatagggctttgcaaagaggtattctccagcagattcttataagcggttttcttcacatcgagttgcatcttcgaagcatcccactctgatttggacgcaccgcccactttatataattcgtcgatacggttgaattctatttcctgattatctagttgcagcttcgtctgtttcaggttggctgcatccatctgcacaagtttctggcctttggatacgcggtcgcccacttccacaaaaatctggtcgatacgtacgggagacgaaggagctatattattctttacttcggcttccaccgttgctgtgtaatcttgtatttgatctacgggacgggcttttacgtctgccagcttcacaatgggcttcgcgtccacatgttccgcagccgctttgtcttttccacctgtacatgagcccataaacacagttaacagcagggctaccaattggatacttcttttcatattccttaattgtaattttttagttgtctatctttattcttttcccagaacctgatcgaggtctgccttagcaaccaggtaatcgtatatggactgattataggtgagttgtgcctgtgtcagcgacacttgggagctgttcagttcgagcaccgtccccttacctacatcataacgtttttcggcaatcactaccgctttctttgcctgcatcacattttccttgttgctgactacctgctctgtgctggcactcatgttattgcgacaactgacaatctgcatattcaattgtctttccgtatcaatacggttccaatcgagctggcgcatctgtatacgggcggatttcactttcgtaaagttacttgccttatataaaggtatactaagattgaacatcaggctggaactgttgctccagttgtaattgaaaaaattgatattcggattatacagtgattgatattggtaggagaaactcattgaaagagtcggcataaagtttgtctttaaagactttacgttcttttcaagcaacttcatgttcaagtccaactgcttcatggtggtattgttgtccagatttacattttcttctctcaactggttggcaaacatggccgtctcatagttggtcagactatcgttaatctttatctccacatcggctgtgatccccatcaggactttcaactgcaacttagccaaagtcaccgcattagctgccgaaatcaagttcggtttaatactgcgcatctgcacttccgcactgatcttgtcatattcgctcacagttccctgctgatatttggcattcaccacattgtagttatcttctgccagtttataactgccttgaagcacttcatagctgtcctgcgcaagcatcaactgataataagccttgctcacctgattcacgagatccagtttggaagcgcgtgacttctctactgccagttcaatatccgtctttgtcatcgacatggcacgataaacgcccggcacaaagagtggcaggttaatactcaaccccgcattggcggtattcgaaccgtcttgtcccatcttgaacgacatatcgttcagtttcatttcagccgctttaatggtatggtctactgaaccggcaatactagcctccggcaacagactttgccaggcttctttgctggctactttctttaaggcgatttcttctgctgccactttaattgtcggattctcatccaatgcaatttccagggctttgtctaaggttaaggttagtatattcttctccgcctgtgtgtcctgtgcctttgcaaaaccaaatgcacagagtgccacagctaccagaagaatcttcttacctgtcaatcttttcatcttgtccataaactgaatttctaatttaatcttacttgtttgtcaatagaacctcactcttgctctaatctgcgatgcggttcttacgatattcttgtataaagtcttccagtacctttgctcctttttcggtggagatgccgcgtatataagtaaacatgatggattcgtacacttcaatgaaaggatattcattgcagatatccgtattcagaagtacgtcaaactgctctcgtaccagcaaattaacgatagcgaagttcacatccggacgaaagatgccctgctctactcccgtcttgaagaaggacatcgttttctgcgaatcgctgtcctgccggttcttcatcatctcatataccttcggatatttcttgatgtcttcaaaaaagcgtttattcgtctgatggaacacctcaatacttttctgaaagactgcaagtattacctctaacacattatgcgactgttcaaagattttctgcaagtacttatctctgtcggcctgtgccttcagtatacattctttcaacaacgattctttatccgaaaagacttcatagagggtacgtttggatattcctaatgctgctgcaatatcgtccatcgtaatactcttgatgccttttgaagtaaaagcttctgttgctgccgttatgatccgttctcttaactctacccgttgggaagcgtcttttccatgctctgccatcatccgtttttctattttattaaaatgcagttttcgttttcttttcatttccaaaggaaaaacggaacaaagatatatagaaaactcaattaacaaatcaagtttccatctatttataatgcatttgggaattattatcattcaatagagtaaaatgaaaacaagtgttaataggaaatacggaacaaacatagggcaaaggtaggaatgaggggaatacaaagtaaagttttatcgccggcagagggattataatcgacaaatgccggataaatgtcgatagaatcaacacttacccagcaacaacagtcaccattattaacgaaaagcgaaaaagggttggtttatggtcaatagtcaatttgtgtcctcttcaggaaggcgactgttttatgtatctccttgtacatcacgatatcatctttcacaaaaggcacttctttccgataggcatgaaggaaacgttcaagaacgggagaagttttcagcggacgacggaagtcaatgccttgtgcagcattcatcagttcaatggcaaggatatgttccaggttgtccatcactttataaagtttggtagcggcgttggcgcccatacttacgtggtcttcttgtccgttggaggagacgatggagtcgctcgaagccgcatagcagtacattttattctggctgaccatcgaagcggcggcatattgcggaatcataaagccggagttcagaccggggttggcaaccaggaattcaggtagtccgcggagtcccataatcagttgggagacacggcgttcggagatatttcccaattcggccaaagcgatggcaaggaagtcataagagatggcaagcggttgcccgtggaagtttccgccggagatgatccgatcttcatcggggaagatggtggggttgtccgtgacggaattgatttcagtcagcaatacggaggcaacgtagcggatggcgtctttcgtggcaccgtgtacttgcgggatgcaacggaaggagtagggatcttgaacgtgttctttgtgacgttcgataagttcgctgccggccaatagtttgcggaaggcttcgcctgtctcgatttgtccctgatgggggcggatttgctggatgcagtccataaacgggtcgatacgaccatcaaaggcttcgagagaaagggcggctatgaggtcggctttttttgagaggcggaaggctttgagcatagcgaatacaccgttggcgctcataaattgggtgccgttgagcagggccagtccttctttactcattagtttgacgggttcccagccgaattcgtcgagtacgctgatggcttcgcactttttccctttatagtagacatcgccgacaccgatcagggggaggaaaagattggcgagcggagcaaggtcgccggaagctccaagggagccgcggtcatagacgatgggcatgacgtcattgttgaagaagtcgaggatgcgctgcacggtgattacttgtacgccgctatgtcctaatgagagggcgtgggctttgaggagcatcatcagtttgatgatgacggggcggatttcttcgcctacgctgcaagcatggctttttatcaggttctcctggagcgtaccgagttcgtcgggagaaatatttttggtacataaagagccgaaaccggttgttataccgtacagcggttcttcggaagaagctattttgtgatcgaggtagtcgcgacatttctggatgcgcaacttggcttcgggagctagttccagtttcaggttttcgttgataattcgttcgatgatttcgaaggtcaatgctccggaaccgatatgatatacattcttactcatacgcgcaggtcttgatttacggcatccaacaattctttttctctccggcaggcggtttgctcgattgtatcggcttcggtttgcagttggaggacaaaatctctgtctttgagcgaaccgaggttgatacggacgttcagcaaggctcccaatacggcggaacgggcggacatcatggctacacaggcatctgtgacggcattgcggtttcccaagcgagcaacatctgctatgacggacatcatatccagggctttgcgagctacttccagcggaacgagggcggcttgtttggttgcttcctgaatggcggcacttcgggcggctttcttttcgtcggttgttttaggaagtttgaagcaggcaaagacttcgttgtaggcagcggaatctttatcgataagtgcaataaattcgtccagcaaacggagggtgattgtttgtgcatgctgcattacttcttcacttgcttcgtatcccttttttcctacggtgagccgtgctaccattgtagaaagggcggaagctagcgctccatccaaagcggcaatactacctccaccgggtacagggtcactgcaagctactttatctaagaaatcttttacggttaaatctgctaacatggtattttgttttaagtgattaattgggtcaactattaagcaacgggatacagcataccgcctttaatagtcatgattacacagttcatgcctatataataaggtagaatatgatagttgtcggaattgagaacgataaaatcgccttgtttgcctacttcgatgcttccgatccggtcggctcgctgaagggcggcagctccgttcagggtcagggcggtgatggtttcttcgatactcattttcatatagatgcaggccagagcaatggtcagcgggatagaaccggagaaacaactgccggggttcaggtcagtagcaagtgctacagcacagccggagtcaatcatttcacgaccacgtgcgtagggttctttcagagcaaaagctgtcaaaggtaacagggtggctaccactccggcatcggccattgcacggatgccgacatcggaagcgtgcaggaggtgatcggcagacagtgctcccagttcggctgccagttcagctccaccgagggagacgatttcgtcagcgtggagtttcaacagaaagccgtgttccttggctgcctgaagcaggcggcgggactgttcgatagagaaaacgccttgttcgcaaaagacatcacaacattctgccagttcgccgccacggacaaggggaagcatttcacgaatcaggaagtcgatgtattcgtcgcttcttcctgcatattcttcgggaagggcatgggcaccgagaaaggtggagactatatcgacacgtttatgctcggtgttgttcaggctacgcattacctttagctgtaatagttcggtttcccgatccagtccgtagccgcttttaccttctacggtggttactcccattgtgctcattcttttcagaaagccttcagctgctgaacgcagtttcaggaaattcatttgccgggtggcttttacggtacttgcgattccgcctccccgctccataatcgacatatagctttcgccgttcagacgccaggagaattcttcggaacgttctccgccaaacacgaaatgggtatgggaatcaacgaagccgggcaagaggcagtgtccgcgagcgttataatgccagtaatgttgatagtaaccgtcgcggtcttcgccacggttctcaccaacgtaggtgatgattcctttggtgacttccacggttccgttctctatgacttgcagttgggacatttcttcgcctttacgggcggaaaagccgatgggagttacgatacgggcattgaatatgattaggttttcactcataaattatccgaattatcttggtttattcttgtttcattcatcctgcttcttgatccgttgttttttatcaggcaggttcccctgtaaacatccgttctgatttggattgaatattcgctaacatatttctttaccggctattccatgatacgggcttccaagacttgctgcatggaaaagttttcgagtccgagatagtaggaagctgtatcaatcagggcttccatcggtacgaggccaatgatttcactaccgacaatcgtaacaccatagcggcgggcttcgatacgtaccagttcgaaggcgcggtaaagggcagtacgggtatagtcggtcatgtttatggatacctgggtgatgtttctctcctttagctccactcccattgctttcacataacggagccctccattgatatggcggatattctttgctatcttggtagctatttccagattgtccgtactaagattgatattgtaggctacgagcggcatacgggctccgatggcgactgcacctgcggttggatgacgttcggcaggtccgaaatctggttgccattcggatagtttgattttttcggccatgccttcaaattctcctttacgaacggaagcgagattttcccgatgcgacgcagttgcggacttctcatacaggaagacaggaagatgatagatctcggctacttttgcggctactttcttggatagttcgatggcttcttccatgctggtattcttaatcgggatgaaagggatgacatcgactgctcccatacggggatgttgcccggtatgctgattcaggtctatcaaacggacagccacaccgacggcttcaacgattgcttcgtacagagcttccggctcgccgacaagggttacaaccagacggttatgatcttcatcattactgtaatcaagcagttttaccccggccttaatacgaaaaggggctactatctgatctattttctctaaatcacgtccctcactaaaattggggacgcattcaataattttattccaactcatatcaaatatctattattatagaggttatattcaactgaataattatatgttttacattaaacaagtgctcttgcccaatagtccttatataatcaggcacggttcacacgagtttcataccaaatcaccgcatggtttatactaaacagctatatgtttaaacagttccatatattatgggaatttattctctcatattaagagaataaattcccataatatatgatactattttcccacaatatatgggactatcttctttataagttcttcgtccgctacatacggcattgttatctgatagtctcttgcatgggagtcattaaatgcttcgcttgtctccatcgcatgcggattacgcgcccatgagcgacgggctactccgcccatcacatcccagagcattgccgaacgaagtatttcatctacccgttcgctaccgtcgcataccataccgaaaccgccattgactgctttaccaataccgactcccccaccattgtgcaaagctaccaggctcattccgcgggcacaatttccggcaaaacattgcacagccatatctgccatcacattgcttccgtctttgatattcgatgtctcccggaaaggagaatccgttccgcttacatcgtgatggtctcgtcccagcatgataggacctacttctccccggcggaccatctcattgaaacggagggctatgttcattctcccaactgcatcctgatacagaatacgtgcctgtgtacccaccacgagctgattcttttcggcatcccgtatccagttgtaattgtcaagatcctgaccgcgccgattgacgtcgatacattccatagctgcatggtctgtttttatcagatcttcgtgtttgccactcaagcaaacccatctgaacggaccgtagccataatcaaagagttggggtcccataatatcttcaacatagcttggccagataaatccgtccttttcatcaacaccattacgggagatttcttttactccggcatcgtatatagctttcatgaaggagtttccataatcaaagaaataagttccgcgggctacgagtttcttgataacttcgaaatgacgatgcaaggatatatctaccaagtgacggaattgttccggagattcgtgaagaaggcgtgtgcgttcttcaaaagttagtccggcagggcagtaaccgccttcgtaaacggcatgacaggaggtttgatcggataataattcaataggaattctttcgcgttcggcatattcgagcaggtctacgacattgccgtgataggctatcgagcagggttcacgatgttgcattgcttgagatgccatccggtatgcttcggctatatccgcagtcacgtgtcccacccatccctggcggtggcgggtttcaatacgcgaactatctacttcggctatgatggagactgctcctgctatctccgccgctttgggttgtgcgccgctcattcctcccaagccggaagatacaaataaatgtccccgcagatcctgatcttggggaatccctagtttcaatcgcccggcattgaggagggtattgaaagtgccatgcacaattccttgaggaccgatatacatccagccgccggcggtcatttgcccgtaattggcaactcccatctgggcagcaatatgccaatcatgttgattgtcgaattgcccgatcatcatcgaattggttattataacgcggggagcatcgggacgggagcggaaaagccctaatggatgtccggactcaataaccagcgtctgttcttgggtaagttcctcgaggtattgttttatcagtcgatattgcatccagttttgacagacttgtccggtttcaccgtaagtgactagttcgtagggatataatgctatatcgaagcaaaggttattgtcaatcattacctgaaaagctttgccttcaatgcattgtccccgatattcgtcaatcggtttggcttttaggtcgccggcaggacggaaacggtatccgtaaatccgcccgcgagtgcgtagctcttccatcaattcaggagccaattgttcgtgccactcggtaggaatataacgcaaagcgttttttaatgcagtgattgtctgcgccggggtaagtgtataaccacggtcgggagctctccggataccttctacaaaatccggataaggaggtagtgtgttgccaagagttattctcataataaacagaattaaggattacaaactgtaagcaatacagtcttataactcttcgcaagatagaaaaaaagaagataaaagacaaaagatttggcagatttattatcagaaaggtattattacatttacagtttgatagaagaacaagacacaagcgatgtcaaaactctcttatgcttttatacaggcacgaatacaggccgttttgtcaaaacagatagataaccctttcactgaagtagatagcagggttggcattacgttaaattgcaaaactatcattaaaacgaatggcggagcttcactaaagctaaaaatagatttttcattaaaatgaatggaaggatcgttggtaagaaccctttcattaaaataaaagagaatctttagtaaagcaaatagcagccctttctaaaatcaacgctatgaaatcggtggaatttgtataactagcgtaacccgcatctcaataatatcattatatagatgattgtattattgatagggctttttcatacgataccaaccgcaattaatggaattatttcttttggttattctgcaactctaacagatatttaaaagtatgctttgcctcctgactatcatctttcaaatatgcttgtttcagttccggataattcttcaataattgcagcattctatctttccccagaaagtcgatttttcccgtttcaccattcaattcatagcaaacacgttttgtaaccagacttgaagcggcaagagcatcgcctatatttcctcctagttttacatcatcttcttccacaaagttgcctccgatgactgatcctaaaggcatcgcacaaaaatagatgtttttgcctaactgaacggcaggagcataccatgctccaaaacgcaatttcttatagcgcaacttacgacagttcaaatataaatttcctttttcgtcacgcacagcaaaacaacgcttcttcaaacgccggcacatcgactcgtcatcaccggccgttatccggtaatcagcccctcctgttaatacaatctgatttctggaacgtttttctacacgcaacacagcagtggtatcgccatgttgagtcagcaactctttcaggttggaataaataatattctgcgcaattaacggaaggctaatcacgcttatcagcaaacataagatacatcctttcttcataagcatcctcctttcctgtctaacgccttttcgagtggaaagttataaattttagcggataaatgcaagaatgagaaaagaaatattgaaaatttcttccagctaacaacaacattatcaagacgagttataatccaagcccacacatcttcctacttccgttaataaacagtaaatctactcttgacaaaaacaagctcctatcccgaccgttatgaattatattacctttgcgcaaaagatttaaatttgtcatggaaaaactagaacagatcattaccacatatcagcaaatcattcagaaaacagaactggagttacagaatgcacgaaaacgtatctattatataagtcttcttcgacttatcttattcgtaggagccgtagcaaatgccattattttttggtctgacggttggctatgcctctctgtattcgctatcctaccctttatcttattcatttggttagtaaaacgccataatttctggttctaccggaaagactttctgaaaaagaaaatagaaatcaacgagcaggaactacgtgccatgcaatatgatttttccgattttgacgatggaaaagaattcattaacccgtctcatctctacactcttgatctggatgtatttggcgaacactctctcttccaatacatcaaccgcaccgcaacccctatcggcaagcaacatctcgcaaactggttcaatgcacatctggaaaataaagcagctattgaccaccgccaggaagccatccgggaactctccaccgatttggaatatcgccaacaaatccgcttactcggattactctataaaggaaaacctgccgataccaccgaaatcaaagaatgggcagccagtccgagttattatcgaaaacgtacgctcctgcgtatcctcccaatagcggttaccgtcattaatttcttatgtataagtctagccatttcaggtatcatctcggctaacatcgcaggaggagtatttgtctgctttgtattattcagtactattttctctaaaggaatcactaaactgcaaacaacctacggagaaaagctgcagattctttcgacatacgctgaccaaattctgctcactgaacaaaaagaaatgcacagtcatatactacaagagttaaaagcggaccttacaagtcaaaatcaaaccgcttctcaagcagtccgccagctttctaaactgatgaacgcactcgatcaacgaagcaatctgctcatgagttctatactcaacggactgatattttgggagctacgccaggtgatgcgaatcgagaagtggaaagagattcatgcatccgacctaccccgatggatagaaacaatcggagaaatagatgcctattgttccctggcaacattcgcatataaccatccggattatatttaccccactatcgctgctcaatctttccacctacaagctgaagctttggggcatcccctaatggatcgcaacaaatgtgtgcgtaacggaatagacattgaaaaacgtcctttctttattataatcacaggcgccaatatggcaggcaagagtacttatttacgtactgtaggagtaaactatctactggcatgtataggagcccccgtttgggcaaagcaaatgaaaatatatccggcccgtctcgttaccagccttcgaaccagtgactccctagctgacaacgaatcttatttctttgcagaacttaagcgacttaaattaatcatagacaaacttgaagccggggaagagcttttcatcatccttgatgaaatactgaaaggtaccaactccatggacaaacagaaaggctctttcgcccttatcaaacaattcatgcacatgaacgccaacggtatcatcgccacccatgacttgttattagggactttaatagagtccttcccacaaaatatccggaattactgtttcgaagccgacattaccaacaatgaactcaccttctcatatcaaatgagaaacggagttgctcaaaacatgaacgcctgcttcttaatgaaaaaaatggggatcgccgtcattaacgactaatccccatcttcgtatgaaaatcaaagttatcttttacagtaacatctaaaacctgttttatttagtagcagcaaactcaatataaagtttcaaactgcatagttttaatgtgtcggaaaaaacaaagtcaaacaggtgttgtagatatatacttattgtattttacttttcgacaaaaaagcgactatcgcagaagctttttcattagtgaaatactgcaccgatgttattggctgatacgtgtaaggtacaaattggaataactgtacagctgcaaactttttatcagcagaaagtatcacatccatacgtatattaccactagcctcgctttttattttcgaatcagcggagaatgaacccgaatttacaagattcttcaaagcatccatatgcttcaaatcaaagaatacactatgctctttagccacactttttgttggtaaataaacaacctcctttgatttccagaaaagacggaaaattcccataaggaataaacctgtccccaaaaccatcaaagccatactggttgtagaagacttgtcatccaattcgaatgttgaagcaaaagctaaaataccaatcaataacataacagaagagattaaaactcctgaaacacttatgcgtttagcaatatcggggtgtgtagatgcgaatatagtagcatcaatcgtttgagtagttgccataatatttaaagtttaatttattagtaaaaatataaagataaaaagaagtagtatcaccagtatacagaagatactagtaaccacaaaataaacaataccaataaatatactgctaaataattatacgcctcaaggtgtatacatagtattcactcgatggctgacaataataggaagttgttgtatcataaatccgcccccagtgttgtgatagtgagctctcacgatcagcacaaccttgtagcgcattctttaaagaaaagaaatattctccaagctgtacacgttgaatacgtgtcacagacatttgatggctctgcaaattagtcaattcagccacaggcttacccggaagatccggtgcacagatttccccacgctgccccatagcatatgtaatatcacacccctgcttatccaccattttttcggtagagacattgcctgctatgctatgaaaagcaactgtcagcaacagaaacaatattacctttacaaattttgccatattcacctgcaaatataacagattctctctatgaaaagtttaattaggatatattttaatgtatcttagtattaataaacggcagacaaacaaaaaaggctacctttaaggcagccttttttatatctataagaataactgtaaaattattcagccgattcagcttttggttcttcagccttaggagcttcagttgcaggagcttcaacagcagcaggagcagcttcagcagctttcttcgaacgacgagtacgagtagctttcttagcaactttttccttagccatgttttcattgtagtcaaccaactcaataaagcacatttctgcgttgtcacccaaacggttaccagtcttgataatacgagtataaccacccggacgatcagcaatcttaacagagatttctttgaacaactctgttactgcaatcttatcttgcaagttgctaaatacaacacgacgagagttcgtagtatcttctttagacttagtaatcaaaggctcaacaaactttttcaaagctttcgcctttgcaacagtcgtagtgattcttttgtgcttgatcaaagagcaagccatgttagataacatagcgcttctatgagaagcagtacgacctaaatgattgaattttttattatgtctcattttttattctttatctaatttatatttagaaatgtcggttccaaacgacagattcagactttccagcaaatcatcaagctcggtaagcgatttctttccgaagtttctgaatttcagcaggtcagttttgttgaactgtaccaaatcgccgagagtttctacatcagcagccttcaaacaattgagggcacgaactgacaagtccatatcaacgagtttagttttcaacaactgacgcatgtgcaatacttcttcatcaaactcttcattgccatcagtatcattactttcaagcgtgatcttctcatcagagaacaacatgaagtggtaaatcagaatttttgcagcttctttcagcgcttctttcgggtgtatagaaccgtcggtactaatttcaagcactagcttttcgtagtcagtcttctgttctacacggaagttttctacagcatacttgacattacgtatcggtgtataaatagagtcgattggaattacattaacatccgtgcaatactcgcgattttcatcagcaggtacataaccacgacctttgttaatggtaatatcaatctgcatagttgacttagaatctaaatgacaaataactaattccggatttaacacttcaaatccagtcaaatacttacctatgtcacctgctttaaattcactggaattctcgacagtgatgctcactttttcgctctcgaactcttcaactacttgcttgaatctcacttgtttcagattcaagataatgttggtaacatcctcttttactccaggtacactagaaaattcatgctccacaccatcgattctgatagtagtgatagcaaaaccctctaatgaagaaagaaggatacggcgtaatgcattacctacagtaataccaaaacccggttccaacggacggaattcgaatttaccgaatctggagtccgcctccaacattaatactttatcaggtttttgaaatgctaatatcgccatgaaattaattattatttagaatacaattcaacgatcaaatgttctttaatgttctcaggaatgtctgctctttcaggtatgtgcaacattttaccaacctttgaagcctcgtcccattccaaccaagcatacttgctgtgattgaaacctgcaagagaattagcaattacttccaaagacttagatctttcacgaacaccaatcaattgtcctggttttactgcaaatgaaggaatgtttactacttcaccatctacagtgatgtgcttgtgactaaccaactgacgagcagcagcacgtgtaggagcaatacccaaacggaatactacgttgtcaagacggccttccagcaattgaagaagtacctcaccggtaatacctttagcagtagctgctttttcaaacaaattgcggaattgtttttccaaaactccataggtgtatttagctttctgtttttcacgaagttgcacaccgtattcagaagtttttctttttcttgaattaccatgttgtccgggaggatagttcttctttgacaaaactttgtcagctccaaagattccttcaccgaatttacgggcgattctcgattttggtccagtatatctagccatttcttttaaatatttaattgtttattcatgaactcaatttgttgcagccgcgattacagagagaaattaatgtaatccaaaaacaaaatcaagatcattgtgtaagttaaaggtaaattaaactctacgtcttttcggaggacgacaaccattatgtggaagcggagtcacgtcaatgatttcagtaacttcgataccagcaccgtggatagttctaatagcagactcacgtccgttacctggacccttcacatatgcttttacctttctcaggccaagatcgaatgcaatctttgcacaatcctgggcagccatctgagctgcataaggagtattctttttagaacctctaaatcccattttaccagcagatgaccaagagataatctgcccttcactatttgcaagagaaacaataatattgttgaaagatgaatgaacatgcaactgtccattagcgtctactttcacatttctctttttagctgcaactgttttttttgccatatcaacaattattatttagtagcttttttcttattagcaacggttttctttctacccttacgagtacgtgcattgttcttagtgctctgacctctaacaggcagaccaatacggtgacgtacaccacgatagcaaccaatatccattaatcgcttaatgttcaattggatttcagaacgaagatcaccttctactttatactctgcaccgataatctcacgaatcttagcagcttgatcatctgtccagtctttaaccttcagatctttatctacaccagctttatctaaaatttttgctgaactactgcgacctattccatatacataggtcaacgcaatttcacctcttttgttctgaggtaaatctacaccaactattcttatagccatatactaaattattttttttgcaaaaataacaaattatccttgacgttgtttatacttaggatttttcttgttaataacatacaaacggccattacgtctaacgatcttacattctggcgtgcgtttctttaatgatgctcttactttcatatcttattttatttatatctaaacacaattcttcctttcgataagtcgtaaggagacatttcgactctcactttatctcccggcaggatcttgatgtaatgcatcctcatcttgcctgaaatatgtgcggtaatctcatgtccgttttctaattcaacacgaaacattgcatttgacaatgcttcaactataactccatcttgttctattgcagattgctttgccatattatattgctttatctcctaaaacttcttctatgaatttgaatgaagacaaaatatcagcttcaccagctccaacagctatcgtatgctcaaaatgtgcagcacatttacgatctctggtcctcacagtccatccgtcactttccattatcacttgtcggtctcccaatgttatcatcggctctatcgctatgcaaaggcctcttttcatcaatggtccatatcctcttttaccatagttaggaacctgaggatcttcgtgcatctctttaccgatgccatggccaacaaactcacgcactacaccataagaatgagactcacaatattgctgaatagcatatccgatatcaccaattcttttaccttgcactgcgttctggatgccaatatataacgcttctttagttaccttcaacaagttacgaatctcttcgtctacctctcctacacaaaaagtataagcagaatcaccacagaaaccattcatgtaagttccgcaatccactgatacgatatcaccatctttcagtacgatatcccctgggattccatgtaccacctgttcattgacagaagtacagagagatgcgggaaacggttctccatattgattcggaaatcctttgaaagttggagttgccccatgatctctaatgaactcttcagcaactttatccaactcacgtgtagttacaccaggcttcaccagtttggcaacctctgcaagagttttaccaacaagcaggttactctgacggagcaattctatttcatcttctgttttaagaaatatcatttctaatctaaagaattaatatgccgctacaccagcgcgtcctttaatacgaccagatttcaacagaccatcatagtgtctcatcaacaaatgactctcaacctgttgcagggtatcaagaacaacacctacaagaattaacaaagatgtaccgccgaagaattgagcgaatcctgcttgcactccgaatacaccggcaaaagcaggcataatagcaactaaagccaagaagaaagaacccggcaaagtgatacgagacattatatcatcaatatactctgctgttttctttcccggtttaataccagggatgaaaccattatttctcttcatatcctcagccatctgagtcggattaattgtaattgcagtatagaaatacgtaaataatataatcattaccgcaaagacaaaattataccagaaacttgtatgatctgtaaacgcatgcaagaaaccgcctgcatcatttacatttgaaaagccgataaatgtaattggaataaacatgattgcctgagcaaaaatgataggcataacaccggcagcattcacctttaaagggatatactgtctagcaccaccatattgcttgttaccaacaattctttttgcatactgtacaggaatctttcttgtaccttgcaccaaaagaatagcagcgccaatcactaataataagaatacgatttcaattataaacataatcagaccaccgctcttatttgctactctggatacaacttcttgcaacaaagcatcagggaaacgagcgataataccaatcaagatgataaatgaaataccgttaccaatacctttatcagtaattctttcaccaagccacaaaataaacatactacctgctgccaaaataatggtagaggtaaccataaacagagtccaatctaatgaagcatttaaggaagggccagcctgcattttaagattgagcaaataagaaggggcctgaactaacaatatagcaatcgtcaagtaacgagtatattgattcatttttcttctgccgctctcaccttcgcgttgcaacttctggaaatacggcacagcgattcccaataactgaattacgatagatgcagagatataaggcatgattcctaatgcaaaaatagaggcattagaaaatgctcctccagagaacatatttaacaaggctaaaaggccttcacttgtttgttcgtgcaattttgccagcatcgccggattgatacccggtaatacgacatacgatccgaaacggtaaattgccacgaacaatatggtgatgaggatccgctgtctcagatcctcaatcttccatatattctttaatgtttcaatagcttttctcattgaatcagagttttactacagttccaccagcagcttcaatagcagcagttgcagtcttagagaatgcatgagcttctacttccagcttgttagtcagagttccgttacccaatacttttaccaactgatttgaagaaataaatcctgcttcgataaagtcgtttacaccaacttttgccaagcttttagcttcagcaagtttctggatagtatccaagttgatagctttatattcaacacgattgatattcttgaaaccaaatttaggaactcgacgttgaagaggcatctgaccaccttcaaaaccgattttcttagagtatccagatcttgatttagctcctttatgacctcttgtagaagtaccacctaagccagaaccagcaccacgtccaattctttttcttgtcttagtagatccctcagcaggttttaaattacttaagttcatattgtaatttcgttttattattcaacaaataattacttaacaatggcaaccaagtgttttactttatctaccattccaagaattgaaggagtgctttcgtgttcaaccacacggttcagtttacgaagtcccagtgcgtcaagagttcttttctgatcagctggagcaccaattctacttttaacttgtttaatctttatagttgacatatctcctccttatcctctaaatactttttcaacactaatacctctgttctgagcaaccattcttgcatcacgcatttcactcaaagcttcgattgtagctttaacaagattatgcggattcgaagaacctttagatttagccaaaacgtcagtaacaccaacactttccaatacagcacgcatagcaccaccagctacaacaccggttccgtgagatgcaggtttgatgaatacttcagcaccaccaaatctagctgattgttcatgaggaacagtaccttttaaaataggtactttcaccaggttctttttagctgactcaacacctttagcgatagcagctgttacttcacctgctttaccaagtccccaaccaatgataccttcttcgttacctacaacaacgattgcagagaaactaaaagttctaccacctttggtaactttagtaacacgattaatagcaactaatctatctttcagttctatatcgttagtaatcttaactctattattaactcctgccataatgattaaaatttaagtccaccgttacgagcagcatcagctacttcttttactctcccatgatacaagtaaccattacggtcgaaaacaacagtagttatacctgcttcctgagcctttttagcaatcatttcaccaactttagcagcttgttcttttttagcgactttctcagtcaaacctaaagaagaagcagcagccagtgtcttaccagaaagatcatcgataatctggacataaatttgcttgttacttctaaatacactcatacgcggacattcagtagtacctgaaattttgttgcgtactctatatttgatcttaactcgtctttctatttttgttgtcataataatctaattttatatgaattacttagcgccggctgatttaccagactttctacgaattacttcgccaacaaacttaatacctttacccttgtatggttcaggcttacggaaagaacgtattttagagcaaacttgaccaagcaattgtttgtcacacgattccaatataataagaggattcttatttctttcagacttcgtttcaacttttacctcagcaggtaattgaatgaaaatattgtgtgtataacctaaagccagctcaatgatgttaccttggtttgaagcacgataacctacacctacaagttccagttctttcttgtaaccttcagatacgcccacaaccatgttgtgaaccaatgaacgatacaaaccgtggaaagcatgtttctgcttcgggttatcaagcatttctttatcgttttctgttaaagttacgtgtccgtcttcaatagtaacattgatagcaggattcacatattggctcatttcgcctttgggtccctttacggtaaccacattatccttcagagtgattgtcactccagcagggatactaatgggtaattttcctattcttgacattctaattcctcctaattaatatacataacacaagacttcaccaccgattttcagttctgcagcctctttgttagtcattacacctttggaagtagatattatagcaatacccagcccattaataacacgcggcatatctttgtaaccagtatacttacgcatacccggagaagatattctttctaactttttgattgcgttaactttgttaacagaatcatacttcaaggcaaccttaatagttccttgaggaccatcttctacaaacttataattaaggatgtagcctttttcaaaaagaatcttagtgatttcttttttcaaattcgaagcgggaacttcaacaactctgtgctttgcaccaatcgcgttccgcaacctcgttaaataatctgctattggatcagtcatataaaaataaattaaattaatcaggactaccctgacaatatttaaacaataattaccagcttgctttttttacgcctgggatcagtccgttagatgccatctcacggaattgaattctcgaaattccgaactgacgaatataacctttaggacgaccagtcagtttgcaacggttgtgcatacgaattggattagaattctttggcaactcttgcaacttctgtgcagcttcgaaagcatcagcaggatcacctgttcttacgatttgcttcaaagcagctcttttctcggcgtatttggctactaatttagcacgctttacttcacgtgctttcattgattcctttgccatatctattagtcttttttagcgtttttaaaaggtaaaccgaattccttcagcaaagcataaccttcttcatctgtttccgcagaggttacaaaggtaatattcattccgagaattcttgtaatactatcgatatttatttcagggaaaatgatttgttcctgaataccaagggtatagttacctttaccatcaaacttactttcgatacctttgaagtcacgaatacgaggaagagctacacgaaccaatttttcaaggaattcgtacattctttcacgacgtaaagttaccataacaccaatcggcatttttttacgcaacttaaagtttgcgatatctttacgagaaatggtagctacagctttttgacctgtaatagctgtcatttcattgattgctacttcgataatcttcttatcagcaacagccatacctaatccctgattgattacaatcttcttaagtacgggtatctgcattgtagaagaatactggaactgtgatttcaatgcaggtgctatacgctctgcatattctttcttaagactagcagtattactcattacttaatctcctctcctgattttttagaataacgcactaaagttccttccgaactcttttttctcccaatacgcgttgctttaccagtttttggatcaaccgggttcaagtttgaaatgtggatagaagcttcttgcttcacaataccaccttgtggattctttgcattcggctttgtgcttttagataccatattgataccttcaacaaatgcacgtccttctttaacaagaaccttcaatacacgaccagttttgcccttatcttcaccagcatttacgtaaactgtgtcgccttttttaatatgtaatttactcattacttaaatcttttacaaattaaagtacctcaggcgcaagtgacacaactttcatgtttgtagcacgaagttctcttgctacaggaccgaaaatacgactacctctaatttcacctgcattattcaacaacacgcaagcattatcatcaaaacgtatataagaaccatcaggacgacggatttctttctttgtacgtacaatcaaagcctttgatactgcaccttttttaacatcactagaagggataacgctcttcactgaaactacaatgacatcccccactgaagcataacgacgacctgtaccacccaaaacgcggatacacaacgcctctttcgctccactgttatcacatactgtaagtctggattctacttgtatcataattacttagctctttcaattatttctactaatctccatcttttagtcttgctcaaaggacgagtttccatgatgcttacagtatcaccgatattgcattcattcttttcatcgtgagcatggtacttcttcgttttgctaacgaacttaccatatatagggtgtttttccttaaatttggcagcaactgtgatggtcttgtccatcttattgctcaacacaacccctgttctttcttttcttaaatttcttgcttccatcaagctgatcatttattgttaagttctctttcgcgca

SEQ ID NO: 8261 - DNA, 5185 bp, Unknown
  gut microbiota DNA sequence
caccccacgcatgagtttcaccacttcggtatattcttctaccaaattctgatactcttgagcggaaagagcgtctccgttcacctcacctacgtcatgtgcctgatgcggctgcatcaccttccatgcgtcacccgcaatgaaagcaaacagcgccaagccgataacaatcaccaatagaggtcctttcgacctaatgttttgtaacgttgccattttgattaatacgatttatgtttattattatttctttcttttgtcgttttagcgcacgaagatacaaaaaatgctaatatgcatctatttattggctaaaaatttcttgattatcgtcattattccaagacttttaatcgcacgagttctatttttgtcgctgtgaccttaattatcttgaattgataacgtcctacccggaccacttcatgcaacttcgggaagctctgatattggttcaggatcaaccctcctactgtcagataatcatccgactcgggcaagtcgagtccgtacgtctcattgactttttctatctccaggcgggcggacaacacatactcgcgttcgtcgatctgcttgctgatataggaagtgttatcgtgttcgtcttctatatctccaaagatttcttcaacgaggtcttccagagacacgatgccggacgtaccgccaaattcatccaccactacggcaatcgttttcttttgctgcatgaagagtttcatcagtttgttggcggacatcgtttcgggcacaatcggcacttgtttcacattctcatgccagtttttcggggcacggaacatttccgacgaatggatataaccgactacgttgtcgatattcccgtcatacacgattatcttggagattccggattctatgaagcggcttttcagctcgtccagcgaggtagtcagatcaacagccaccacttcagtacggggaacgatgcagtcgcggatttttatgttcgagaagtcgagggcgttctggaagattttcacttccgtgtccagctcttcttcattttcggcattatcaatgctgctttgtacgaaatagtccaggtcgacttttccaaaagctctgtcggacgcatccttattaactttcattccaaagagacgaaggaagatacaagacaaaccggaggccaatttggagatgggatagagaaccacataacaaacaataagcggaatggcaaaaacattcaagaccagattgggattgattttgaagattgttttcggcaaaaactctccggtcaccaggataatcagggtagaaataacggtctgcgccaataccatcaggaaatgattgtcaatgaatcccgccagcagattgtcgccgataatctgtgccatcagaataccatagataaccagtgcgatattattccccaccagcatggtagagataaattcattcgggttcttgaagaagatagaaaggatgcgggacgtaattccccccttgcgttccatctcaaaacgcagtttgtctaccgacacaaaggcaatctccactcctgaaaagaaagcggaaaagaccatggtgataattagagagatataaatattcataagttttgatttacgatcagacgatttacgaggtacggtacaatgatatgacttcgcctatttcgcagtatctttattcactgaatccggcagtgcttttgtttccggttggggcggaccgctactcgcttcctcgtccacatagaaaataccttcaatattacgaatggtatatatagtcatttgctggttcgagtcgaagccgtgtcctgtgataattctgtccggttgctggatacgtataaacttgtcggaatacactttttgagtggcctcattccagtagagcagttcggtattaaaacgctctcctttgcggttctgtatatccacattccctatcagcttccaaagcctttctttgtcataataataggcagtatctgctttaatactggcttctacattaaagatagagtcgaactgctccatatacacacctttttcaaacgcccaatacgaaggctttttacggtcgtacatcatccactcttccgtgttcaccctataacgtgtcactccggaatcggaaataagggtagtaactcccaatgtggtcatcaccggaagagaatcacgttctgtgatagcctctcccatagctttctgttttccgccacaggaagataataaaagaagcataacaaccaccccgaaggtgattgttatgctcatgcttttatgcaacaaacggtttcttcgttttcgcaacatacggttatctaatcgttgtagtctctcctatccaaccgccgatagtgatgcggtcgccttgcttgtaacctaacataaacaggtctttagcttgtggagtatgaccagaatatctaccgatcaagctgttagcttcttcagctacgctcggatctacttgttttgcacgttgcagtttgtcgattactgcaaagtaagtacacttgttcaaagctgactcgtcgctccaattaggactcattgcatacagattggcaatcaggatatatggagcaccatagttctcgttgaacccgatagctttctggcaatatgctcttgcttgagacagttttttagcagaagccaatactgctgcggcagcgtatgctttttcagctttcttcacgttgtcagtttccaatccaatggcttcgtcgaagaatttgacagcaccgtcgatgtcacctttcttaaatgcctggtaagcacatccggtagcggcatctgcactaggttctattttgtacacatagaaagcagcctgttgataagcttcgctttccgtacatctcatcattttcatgatgtcaattactttcttcaagtaagccaggtctgtttggttagcttctactttcggtccatagatgttttgcagtgattcgcaatcagctgttccgctgtttacaaacaaagcaaccagattatctttgataccttgcaagtttttcttctttgcttcgttcgtttcagcagcaatagcagcatcagcatattcagaagcagccagataatcctgaatgaattgttccttatggttaggatctgttttcagtttatccaaagacatttgcaggaaatagaagatagtagcggcagcagattcagcttttactgcatttaccgactggctcaaccattgataagcctgattaacatcaattttcggagcgaaagcgatgtaatctactgctttgatacccagagcttcatcagcagaagacacttttgtacctttagccaagaactcatctgtgtatttgatacgcaaatcatgcgtattcatcagctcatcaaaatatttctgatattccggattattcctatccttgatttgtcccatcaagcctttcagaattttatatccgtcagtaaatgtatagaaacgaagcgtcgggcagttttccaacacagctttccaaggagtatacgcatctttaaagttacctgcacgcacagcttcatgcgagatactactgttcgagttacagttagtcgcatcctgtgctaccacagtggttgcccctgccgaaaggaacaacatagccacaagcgttttaattttcattgtatctaaattttagttgttattattatagtcgtctattctttctcttcttacattcatctcaattactctactctgcgtttgaagaaccaacgttcgttgaacgtcaatccgatgctaacgcggaagatattttcgtttacaaaggtcgattcctgtccacttacacgaacaaactgtccgctaatgctaaggatggaacgggaacgaggcacaggcagaccgaaaccggctgttacgccatattcgcgggctgcgtctttaccaccaatcttataatacggagtcgtataataagctcccaaacgatatttgatgtgggataaataggaacgtccaattaaattggggatatattccgcacccactgatattttatgacggttgcaatacgtgtatgtttcatcaaaatcttcacgtacagcatcatccgatgtatttacgccaaacttagcttttgaccactgctgcaaactataatccagaccgacagtcaaacgtttgtcatagttatatgtaaagccgacgccaaaagtattaggcacttcaagcgtagcatcccaatcctgactgacagttgagctagcttgcgtcgttactgtataatcattattcagtttatgcttcggagaatatactgctccgatagtggctgaatgttttttgttaaattcttgcgtatattgcaatccaaaatccagtttataatccgacactgacacagcattctgcctaatgtaagaataagcagaagcggtattcggataaagctgcgtcaacgagcgggttatatctccccaaaaataagaagcattcacaccaacagacaggtttttcaagacttttacacccgcaccaacatacagttgatgtaaacctccctcaccagtaaggcttttcgtgctatacggtgaagtttctgtagcctcattgctttccgatacagaatatcccacattggagaacggcaacagaccgatactcatcgctaccctcggatgcaaacgaaattgcatagccagatagtcgaagctagagtttttagcgttcagtttcacaccaccgccactaatattcatattttgcagactaacgcctccttcaaaaataaacgtcaacgagtcaatggctgtatacgaagcaggattcagcggattgatctgtgctccatcccgaagtccaaaagcaattccccccatcgccttgctattcccgaaactctgatcggacaagtcgccatagccatatcgtgtataaggagagtttgtattattttgagcgattgccattccggtaaccatcgtgagcaaaagcgcacaaagtgtgtgtttaaatcctaccattattatagtttaaaattctatttaatcctttcaacactaaaaatctatctgcaaagatgatactttttacgctgctatcaaaagaaaaatcatctccgcccgttaaaaaaaccaaaagttcaggatatttatgcttcatagactcaatataacctgaaatttcgtattccatccctttcatcactccggcgcgtatagccgtttcg

SEQ ID NO: 8262 - DNA, 3049 bp, Unknown
  gut microbiota DNA sequence
ttcattatgtatctatatgtctgtactttatatgcaattgctcaattaaagatatatgcctatatttactatttttatttgaattacaaacgtaatattcgagttgtataatgcagtatacttttgtaatactgatatttttatatttgtgatttgtttttgtgaatctaaatatttacctttgtattatcaatgatgtaatacgtatttttgtgaatcaggtgcataacacatacaattgtactaaaaagaaggtagtatggaaataaaagacagaatcagaatgataatggagagagaaaaagttcctcctaaagtttttgctaaaacaatcggagtacaacaatctactctctctcatattttaaatggccggaataaacccagtttagaggttgttatgaaggttcatcaaaagtatgactatgtaaatcttgaatggttgctttatggaaagggtgaaatgatggtatctgaagaagagacatctttttcttcttctaatagcgattatctgccttctttatttgacgagaatctcataaattcgtccaaagagccggctattccggaaaatcgcaaggaaatgccattaagaaacgctgaaaatgccactaaagagattgtaaaacaagagattaggtatatagaaaagcctgccaggaaaatcacagaaataagaatattttttgatgataatacctatgagacgtttaggcctgaaaaataaagagtaaaatcggtggtttgagcaatttcctgtatctttgcacccggaatacgaatttatacttttatatccatacatgaagaaatttattttagatctgacagtgaccgagaatatcagattgaatgcaaactatgtattgctaaaattgacgtctcagtcattactgcccgaaatgttacctgggcagtttgcagaaatccgggtggacggttcgcctactacattcttgcgtcgtcctatttctattaattttgtagataaacagcgaaatgaggtctggtttctgatccagctggttggtgatggaacaagacgtctggcagaggctaattctggtgatacaattaatgtggtgcttccgctgggaaatgcatacacaatgcctcaagaggcttctgataagctcttattagttggtggaggtgtcggaacagctcccatgttgtatttaggtgaacaattggctaaaaaaggccacaaacctacgttcttgttaggtgcccgtagcgacaaagatttgttgcagctggaagagtttgccaaatatggagaggtgtatactactacggaggatggtagccatggcgaaaaaggatacgtaactcaacattctatattaaataagatacgatttgagcagatttacacttgtggtcctaaaccaatgatggtggctgtggcaaaatatgccaaaagtaatcagatagaatgtgaagtttctttggaaaatacaatggcttgtggtatcggagcatgcttgtgctgtgtggaaaatacgacagaaggtcacttgtgtgtatgtaaagaaggtcctgtttttaatataaataaactactatggcagatttgagtgtaaacattggtgaattacaaatgaagaacccggtaatgacggcatccggtacatttggatatggtgaagagttctctgattttattgatataacgcgaataggtggtattattgtaaaagggacgactcttcacaaacgtgaagggaatccttatccgcgtatggcagagactccttctgggatgttaaacgctgtaggactgcaaaataagggtgttgactacttcgtagagcatatatatccccgtataaaagacattcaaacgaatatgattgtaaacgtttcggggtctgctatcgaagattatgtgaaaacggctgaaatcattaatgaacttgacaaaattcctgctatagaactaaacatctcttgccccaatgtgaagcaaggaggtatggcttttggtgtgtcagcaaaaggggcatcagaagtagtgaaagcagtgcgttctgcttacaaaaagacacttatcgtaaaactctccccaaacgttacggatatcaccgaaatagctcgcgcggcagaagaaagtggtgcagatagcgtgtcattaatcaatacattgctgggtatggcgattgatgcggaacgtaaacgccctattttatcaacgataacaggaggaatgtcgggagcggccgtaaaacctatcgcattgcgtatggtatggcaagttgctaaggcggtaaatattcctgtcattggtttagggggtattatggactggagagatgctgtcgaattcatgcttgcaggtgcgacagctatccagattggtacggcaaatttcatagatcccgctgttactgttaaagtggaagatggtataaataattacttggaaagacacggatgtaagtctgtaaaggaaattattggtgcgcttgaggtgtaattgaaaacacacaataaccattcgcactaagtctgcgagaaaaatgctatttttcttttgaataaaggaagaataaatgagttgaaaacagcagatgaaaaataaattagtgtttgaagatattagctatcagcaagatctttaaactgaaggcaaaataaaaacgacggtgaggatttacataatcttcaccgtcgtttttatttacactctattttattctcccaataagtcgggacgaagttttctggtacgttccaaggattgttgcagttcccattctttgatttttgcttcatggccggataagagaatatcgggaactttccatcctttataatccgcaggtcgtgtatatacaggtgctgccagcaaattatcctggaaagaatcggaaagagcagactgttcatcagaaatgactccagggatgatacgtacgatagcgtccgccatcaccgctgctgccagttctcctcctgttaatacgtaatctccgatgctgatttctttagtaatcaggtgttcgcggatgcggtaatcgatacctttgaaatgtccgcaaag

SEQ ID NO: 8263 - DNA, 1393 bp, Unknown
  gut microbiota DNA sequence
attcttctctgctttcccatactgtttcaccaatacacttacgcctcctttcaacagttcgggagtcgcctccatagtgataaccttttcttcgcccggcatcaacgtcacataattatcggacataataattggaagtattcgtttttgcgtagccttattaacaagcctcacccgattagcaaaagccacagtctcggaattgttctttacagctatatttatctttccgtcagacatcgatttatccaccaatcggcaagacaaagcaacttccggaagtgtgttcagcaatgtatagtcaagatctctcacgccattccgccaatagaagttttcagagattaaattacctttggcatctatcagttccaacttgataaaatgaagcggagtcagttcttctatctcttttggtttctcaccgtagatttcgaattcgaacaaagaatatccaaactgtgtggcacggctgatgcctgccaatttcacataacgtgctgtaacaggttccaattcaatctgttcagtaccacctcttccatctttgttggcataaacggttttccattcttgcgcatcattcgatacttgcagttcgtatttcttagcacaagctgcctcccatttcaaaataaccttttctatcttttcttctttaccaagatcaatgtatatccattgaggatcactgtatgcactttcccaacgacttccggctcctccgtcagtaaccattgaagcacttttagaggcacctgttgaagaagaagctacagccttctttccataagccagattgaaagggttaaagttcaaagaaaaagcttctgcaatgttgctggctgccacatcgacctgttttgtctgtccgtatgcaggcacttcttttccattcaggtcataaattgtagctttagctattgcacctttcaagtcctctgctgtagtatttattacttttatattgttattggaagcattccattggatatgtaaaggttcacaagccttttttgctccccaataagcacctgtaggatcataataatagtcataagtctgccatacaaacgagggataagccggatggctcatccagatcagaagtccggctgcatcattccacatcttatcgttccaagcctcatacatacctttcatcacttcgagattcagcatttgcgctttctcgcagaattcttccaatccggatgattctccgtactgtgtgttcactgaattcttataattaaccgggttggcattagacgcttccttaccgaagaaatgtttgttccatacattgtcatcatcattcttcaactgctcatcagtaggcagaggccaccagtctttttccgggataaactctttgatactttcaaatgtg

SEQ ID NO: 8264 - DNA, 7662 bp, Unknown
  gut microbiota DNA sequence
agagcagggagctgattcataaatccattatttgtctacagagaatttgaagatacattggcttgtatacttttcgcccgggcgaagtacagccgacggccattccggtttgttcggagtatccggatatttctgtgtttcgagacatacggaagcacgttggttgtaagtaatgcctttctttcctgtcagcgaaccatcgaggaaattacctgcatatacctgaatacccggttcattagtataaacgtcgagtacgataccagtcttcggtgatttcaaagaagcgcatttacgggttacgtcgcctttcgtgttcaatacccagttgtgatcgtaaccattgccgtttttcagctgtacgaaatcatagtcgttgatacgttcgcctaccggagtcggggtgcggaaatccatcggagttccttctaccggaacgatctcgccagttgtcatgaaagtactgtccaccggagtataatagtccgcatccaccatcaacaaatgaccggagttgttgccggcatcgccttcaagattaaaataagagtggttggtcatatttacaatcgtcggtttgtctgtttccgcttcgtattgaatatcgatggcattatcgtccgtcagtttcatcaacactttacaagtgatgtttcccggaaaaccttcttcaccgtcttctgcacggtaagtcaactgtaattcctgcggattcaacaatgctgcatcaaacacccggtattggaatccttgcggtccgccgtgcaaacaatgaccgtagttattgcggggaagctgatattctacaccatccaaggtgaactgtccctgattgatacgattggcataacgtccgatagtcgcaccaaaatccgaaggcttgctgatatagtcctgaatagaatcgaagccaagcactacgtcctgcattactccgtccttgtcgggaaccatcactgaaacaatacgtccaccgaagttcgtgatacaaacttccatgttgttcttgttacgcagagtgaacaaatcagtcttctttccatctacttctgtctggaatttactctgcaataaaccggaatctgtagccttttcagctttcggagtacaagctgccattaaaagggcggcaactgcccatacacataactttttcatgatacaattgttttttttaatattagttttcagctattcatatttagatgcagacgacgcggataacgcgttttttctaattttgcatcagaaaaagagccgcatcatccgcgttatccgcgttcaatttactatgtcagcatattattgtatactattcaataaatctacctttccttcattaaccaacttcaaaatcaactcaccgaaaagagtattctgccaggcaaaccatgcacgggtaaatttcttcggattatccttatggaaagattcgtgcataaagccggtgtcagcatccgtgtccatcaacatcttgatacaggtcttgatttcggcatcattctgacttgtgaaggctttcatcataatactcatcggccacaccatatcgtaaccgatatgcggtccgccgattccttcgcctgccttgcctttaaagaaataaggattgtcctcactccacacaaaacggcgggtattctgataaatcggatcgtttacattcacatcacccagataaggcatcgcaagcaaactcggcacattggcatcatccatcagatgatgatttccaaaaccatctacctcgaatgcatagattttaccatatttaggatgattatacaccgcatatttctttaaagctgtttccacctcctgcgccaagtccttacattctttagacaaagctgtcttcttgtttaccttctccaaaatctcggctgccttacgcaaagaagatacggcaaagaaattggaaggaaccaggaattgaagcgtagtagcatcgtccgaaggacggaaactggaaacaatcaaaccgactggtttcaccggtgctcccagaccgtcattgctcacagtatccagtgcacgttccgtcttacgttggaatttataaggacctactccgtctttgcgttgttgctctttgaatgttttcagtacattagtgattgcctgaatccattcttcgtcgaatatgctcgcatctccggtagtcttccagtaatgataagccaaacgcaacggataacacaaggagtcaatttcccatttacgttcgtgcaactccggtttcatgtctgtaaggtcgctcatccaatgaccatcaggaatagcgccatcattaaaagcattcgcgtacggatcgatattgatacatttgaactgacggagaataacacctgccagcatttctttcagttcagggtctgcattagctaattgcacataaggccatacctgtgcaccggagtcgcgtagccacatagcatgaatatcacccgtatatacgaacgtatccggtttgccatcgcttcctttacggaaatgtacggttgtatccagtgtattcgggaaacagttggtaaacatccatgccaacttcgcattcttcaaaagtttctgtacacggagaatctccttctctaccgcattggaacggaacagacgattggatatttccgggcggttatctttctgaatagcatccgccagacatacatgcatttccgtcatacggttggaggcttgtaactgcccgccacagagaagcatacctgccagcatacctgcactgatatatttgatctgtttcttcatgattacttcttctttttaaattcgttagagaaagaataagggaaatcggattctttggtaccacgttgctgattgggtttcgcgtccattttgtaagaaatgctagcgccattcaacaggtcctgatgggtcagatagtttttggtatattctttaccgttcaatgtcattgatgaaatgtaacgcttgtcgtctccgttattcggagcggagatagtcaccgtctttccgttttccagatgtagcttcatctccttgaagtaaggagtacccaagacatattcatctgtacccggacataccggatagaatcccattgccgagaatacataccaggcagaagtctgaccgttgtcctcatcaccgcaataaccgtcgggagcaggagtataaagtttgtccatcacttcacgaatccaatgttgcgctttccagggttggccggaatagttgtacatatagagcatgtgctgaatcggctggttgccatgtgcatagttgcccatgttcataatctgcatttcacggatttcatgaataacggctcgataataactttcatcgaaaatcggaggcaggataaatacagaatccatcatttggttgaatccgtctttaccacccatcaaatcgatcagaccttgaggatcgtggaataccgaccaggtataatgccagctattaccttccgtaaaggcatccccccacttcaacggattgaacggagactggaacgtaccgtcttcattcttaccacgcatcagtttgtgttcgggatcgtagagattcttataattcattgcacgctttgcaaagatttcaatctcttttttcggtttcttcaaggctttacccaattgatagatacaccagtcatcgtatgcatattccagtgtacgggctgcattctcgttaatacctacattataaggtacatatcccaatttattgtaatactcatgtcctaatcgtccggtagaacgaacattcggatgcactgcattcgctccgtgtttcacggcttcccacaatgtctcgatatcgtatcctttcaatcctttcaggtaagcatcggcaacgacagaagcggagttgtttccaaccatgcaacctctgtgtcccggacttgcccattccggcaggaatccgctttctttataagtgttcaccaatccttcctgcatctttgtattcatggatggatacatcaggttaaggaatgggaaaagacaacggaacgtatcccagaaaccggtatcggtaaacatatatcccggaagtacttcaccattataagggctgtagtgcatcacgtctcctttagcatctatctcgtagaaacttctgggaaataatactgaacgatacagacaagagtagaaggtacgcaaatgatcgatatcatcgtctttcacttcaatacgtcctaaaacatcgttccataccttgcggcctttcgctgcaatctgttcaatgttgtccgtacccagctctttcaagttaagttccgcctgttcagggctgataaaagaggaagctacacgcacatttacctgttcgcccttacgggttttgaaaccgatcagtgcaccggcatgattgtctgtcgcttccagtttgttggtgtcaatcacaccactggctacggcagctgtataagtaaacggtttgtcgaataccagtacaaagtagtttttaaagttggcaggaacaccaccgctgtttttagtggtataaccgataatcttgttctccgaagggattactttcacaaacgagcctttatcaaaggcgtctaccactacataagagtggtcgttttcggggaaagtgaaacgaaaagcagccgctctctctgtcggagcaatttcggtcactacatcatgatcggcaagatatactttataataataaggagtagccgtttcagctttatgagagaaccaactggcacgctcatcctgattaaatactgccttaccggttatcggcatgatggcaaattgaccgtaatcattgatccagggacttggctgatgggtttgtttgaatcctctgatcttgtcagcgtcatacgtataggcccatccatcgcccattttaccagtctgcggaacccaaaagttcattccccagggcagcgcaatggcagggtaagtatttccggtagataatgcgtgctttgactgcgtaccaaccagcggactaacgtagtccaccggtccagtaattgtttttgcagtcatagcccatgcactaagtaacgtaaaagcgaatagagctagtttcttcatggtatttttgttttatttaatcagttttccttcaagcattttgatataatatccacctacaacggaacgtgcctggaagcctctttgattcggttcgtctgtaaatacccagtcggacatcggaacacggttaggtgtaacgttcataaacagatatacgggttcgataaatttctcaaaggtagctttgtcatttgccaatgtagctgtccacatgatccagtcggtctttgtgtatgtttcacggttatccaacggaagaccatatttattttgcttcgaaagatagtaagctatttccgtttctgcaacatttttagggaagatttgcagattcaacagtttatcccacaccaggttatacttctggctccatgttcccggtttgtcaaatgtgagacgatagtggtcaccatcatcagccattttcacccattcggcagccatttctttcgctttctgtgtgtacttttcagccacgtcttttttgcccagcatatctgccagataaccgtatgaagcaacacccatgattgctttgatagaaaggttggcattgtgtgcaaagtgacctgcaaagtcatcggtacaaagttggttggccggatcaagtccgttctctaccagatagtctgtccacgtagtcagggtttcccaatgtttctgtgcgtaatctgcattaccttctacttttgcaatggcagcagccaacactaccatattacccgattcttctaccggcatatcaccgccataagtctggccgttagccaatggataagtaccgacatcatgcgcagcaaatggtttcgtccattttccgctttcactataatagaagatatggttcatggtagctttcaccaattccggattgtagtataaaagcaacggagctcccggataagtcaggtcgactgttccgatggaaccattactgaagttctccttagaaaggaataccaagtcgccgttcggagcctgtaccagtttatgtgcagccaatgcctgacgataagccaatgcacaaagttcggcatatttacgtccaccggcagcagtagcttcttccatcagtttcttgtcgaaagcagcgctattcttcatttgtgtcttgtattctttctctgctttctggaattgggaaacaatcgtttcattaccctcacggttccagtaaggacgcaggttatcaccaaagtattggatagaataaatatcatcatacccgatcaacagatggccatcagctttttgtgtttcgcccaatgaacgtaccaaagccagtttatcataaccgtttgtggtaggagcttccagtttattggctacgaagttcttgcgcagctctctgccgtcaccgattgcagatgtgctgttttccttttcagctgccagatagaaatgtccccagtcgatacgaacatcatcaccctttttcttcagaatatcctgattgcggctaccggtacgaaggaataacaaatcaccgtcagtaaagctgtcggcaacagattcctggtgaggttggtcgattgcccattgcggagatgcttcgaaatacagttcaacctgatgtttctgaccgtcattggaggctacttcataagaaatatagttgaccggacgtgacaacaagtccagattatccatgaacataggagcggtaaatgtcagtttcaaatctaccggaccgcaagtaaatgtataataagtctgcatgggttgtacatctgcagaagtttgttgtgctgtttgatggaaagaacggtaaccgtccagttctaccagcaatccgaaatccaacagtccgtttcctacccggttatgacaataacctgcaatcagattttcacccggtttcaaagaagctactacttcttccgacagtttcacccgctcgttctttttacaagcattgcctgtatccactaccttgatgccgttgatataaataatagcatcatcgtcgtgagagaattcaagatatacattttttcctgtcaagtcttcctgaatatcagctacccggcgtacccagataaattcttctccccattgggtcttggctgtatgttcattttccatcgttccgaaggcagcttcgccttctttccatgctttatcattgaatccggcattctgccatccgtcagcaggctgttgagtggtatactttcctgtccagctaccttgttcggatgtctttaccaaaggacgtagttccagttcttccgttcccatgaaacggtaggtttgtccgtctacttttgcaacaccaagtaaagaaaaatccttgcctgtccaatgttttacaggactgtcgtatagattgtccgtagtagaccatgcactagtataaggatcaattgtcaccagcgggtatgccggagcacgtaattcattcttctcgtgctgttctacctgggtctcacagctacaaagtacggaagctgttcccagcaacagcatcatcagttgttgtttcataatttaattcacctgtttatttaatctattttaccattctatcgatacattcactccggcgggatcattctcgaaactcaataaaagagttttggaagattcatcccactcc

SEQ ID NO: 8265 - DNA, 13583 bp, Unknown
  gut microbiota DNA sequence
ttgttggataatgcatcacgcaacgaagcatccaagattttcggaacgctggataatacgccgatcagttctattacaatgggtgtatccactatccttggcgcaaagaaggtttatctgcttgcatggggggaaaacaaagcagctatgattaaagaatgtgtggaaggtgcgatcactgacactattccggcttcttatctgcaaactcacaacaacgcgcatgtagctcttgatctttcagcagctatgaacttaacacgtatccaacgtccgtggctggtaacttcttgcgaatggaatgataaactaatccgtagtgccatcgtttggttgtgtcagttgaccggcaaaccgattctgaagttgacaaataaagactataacgaaaacggtttgagtgaacttctggcactttacggttctgcgtacaatgtaaacatcaaaatcttcaatgatttacagcacaccattaccggatggccgggtggcaaacctaatgctgatgacacctaccgtccggaacgtgcaaaaccgtatccgaaacgtgtaatcattttctctccgcatccggatgatgacgttatttcgatgggtggtacgcttcgtcgtttggtagagcagaaacatgaagtacacgtagcttacgaaacttccggcaatatcgccgttggcgacgaagaagtagttcgtttcatgcatttcatcaacggattcaaccaactcttcaataacagcgcagatcaggttatcaatgagaaatatgcagaaatacgtaatttcttgaaagagaagaaagatggtgatatggacagtcgtgacattctgactatcaaaggtctgattcgtcgtggtgaagcccgtacggcctgtacttataacaatataccattggaacgatgccacttcctagacttgccgttctatgaaacaggtaagattcagaaaaacccgatcagtgaagcagacgtggaaatcgtacgtaacttgcttcgtgaagtgaaacctcatcagattttcgttgcaggtgacttggccgacccgcacggaacacaccgtgtatgtacggacgccgtattcgcagccgttgatcttgaaaaagaagaaggtgccaaatggctgaaagactgccgtatctggatgtaccgtggtgcgtgggctgaatgggaaatcgaaaatattgaaatggcagtgccgatcagtccggaagaacttcgtgcaaaacgtaactctatcctgaaacatcagtcgcagatggaaagcgctccgttcctgggtaatgacgaacgtttgttctggcaacgtagtgaagaccgtaaccgtggcacagctactttgtatgataagttaggactggcttcttacgaagcaatggaagcatttgtagaatacgttcctttataagaataatattcttaattaagagaatataaaacaatgaaagaagagtgggaagtttcgatacttctcgctctttttttgttatttttgcggggataattcaccacagaggaaaggaggacacagagttattatgaacaaccatttttatatcgcttcatagatttgccctccgtgttctcctttcctctgtggtgaaaatgagaacaaaagcattgaataatgaaaaagataatagtgtttcttctatgccttactgtaagtgctaattttcttttcgctcaagatattgaaagaaatgtaaaagaacggctgacggattacttcaacaaatataccgcaacagccaaaatcagcactcctaaactgaacagtttcgatataaattatgatcgcaagacgattgcaatctatgcatcggagagtttcgcctatcagcctttccgtctggaaactgtagaaaacatttataatcaagttaaagaactgcttccggggcctgttcattattaccagctcaccatttatgcggatggaaaacctattgaggatttggttcctaatttctaccggaataagaaaaaggataaggagcggttatctttgaatatagattataaaggagctccctgggtgaaaaacatttcacgtcccaatgaaatttcacgcggactgcaaaaccgtcatatcgcaatctggcaaagccacggcaactacttcaaaaatgataaaaacgaatggggatggcaacgccctcgattattctgcaccacggaagatatgttcactcaatctttcgttcttccatacgtgattcccatgttggaaaatgctggagcgattgtttatactccccgtgaacgggatacgcagaagaatgaaatcatcgtagataatgacactcccaacgcttccctttatctggaagtgggtagcaaaaaagctaattggacaaatgccccggtaagaggatttgctcaaaagaaaacgatctacaaagagggagagaatcctttcactgacggaacctgtcgtttcataccaaccgaaagaaagaaaaagaagaataaagaccaggtatttgccgaatgggtacctactctaccggcaacaggcaagtatgccgtttatgtttcctatcagacactcccaaatagtgtaagcgacgccaaatatctggtattccataacggaggagtaaccgaatttaaagttaatcagaaaataggtggaggcacatgggtttacctcggaacgtttgaatttgataaagggaacaacgactacggcatggtggtacttagcaacgagagcagcgaacatggagttgtatgcgccgatgcagtacgttttggaggtggaatgggaaacattgcccgtggaggaagaaccagcgggctaccccgttatttggaaggagcacgctactctgcgcaatgggcgggaatgccatacgaagtgtatgcaggacgtaaaggtgaaaacgactatacagacgacatcaacacacgttccaacgctatcaactatttgtcgggcagttctgtctacaacccgcaacaatcgggtttaggcgtacctttggaaatgactatggcgttgcacagtgatgccggatgcagcaagactgatgagcttatcggatcgctcggtatctataccaccgatttcaataatggaaaactgaatgcaggaacagaccggtatgcatcacgtgacttagccgatattctgctcacacagattcagaaagatatttattcaagttacagcatcccctggacacgccgcagtatgtggaaccggaattacagtgaaacacgtctcccggctacaccttctacgattatcgaactgctctcccatcagaacttcgcagatatgcagttagggcatgatccgaacttcaagtttacagtgggacgtgccatttataaaggtattttgcagttcattaccagccagcatgataaagaatatatagttcagcccctaccagtcagcaatttcgccattcaattcggaaagaaaaagaatacattggaactttcatggaaaggtgaagatgatccgcaagaaccgactgcacgcccacgggaatacatcgtatatacacgcatcggttatggaggctttgacaatggaaccttagtcagcaaaacgtcccacaccgttaaaatagaaccggggctcgtttattcattcaaagtgactgccgtaaaccgcggcggggaaagctttccctccgaaatcctttccgcttataaagccaaacgcgaacaagaaaaggtaattatcatcaatggctttgacagaatcagcggtccggcggtcgttaatacttctgatagagcaggattcgatttatcacaagatcccggagtcccgtatatatcaaacatttcgttttgcggagcacaaacaggcttcgaccgtacacaagccggaaaagaaggaaaaggcagtctgggacatagcggaaacgagttagaaggaatgaaaatagcggggaacacattcgattatcctttcattcatggaaaagcgattcaggcagccggcaaatatagttttgtgtcatgcagtgacgaagcagtagaaaacggattggttacgttagaagattatccggtggtagattatatcctgggactggaaaaagaagatcccgcaaataaagcgtactacaagacattctcctcggctatgcaacgaattatgaccagttattgtcagtcgggaggtaatctttttgtcagcggtgcttatgtaggaagcgatatgagcggcacacaaggaaaccgggagtttacagagaaaatactgaaatatggttatcaaagtagcctgacggataagagttcgaatcagattaaaggattggggcgcacaatcacgatcccgcgtctgcccaatgagaacagttatgcggttcctgcagcagattgcatcgttcccgtagatactgctttccctgtatttacgtatgcacccggcaatcagagcgcaggtatcgcttacaaagggaactaccgcacttttgtattgggctttcctttcgaaagcatccagtcggaagcggatcgggcaaccatcatggcaggcatcttgggattctttactcaaaaataaaaaatatccttttttttaatccgtttctcattttaaattctatctttgctactataataacctttaaaactaaaaaacaatgtatactatacaagcaaatcctagcggtacacgcagcatagaagtatctaatgaaaacttgagaacgattgagaaatatgctctgttccgtcatcttatcgacagtaccggtattgtagatgaagcagttctggataagttgaaactaaatatccgctcccttatcgccagtcaggaagaagacagtaaagacttgctggacctttgtatcgacgtgatttatcacaataatatgaaggcattcggtctgcaacagctcatcaagctctatcttacctggctttccaacacggaagcggaagaagaggaggaataatgattacggtagatacctgcggaataacagcatacagtccgctgattcctgcaataagagcaatgtgcactgcctctccgggagaaacgatagagattatcatgaaccatgctgacgcgtttcaggatctaaaggaatatctgtccgagcaaggtatcggttttcgtgaaatctatgatggagaacaaatgacattacagttcacaatcaatgggaagttataaaaaaacatctcaatgattgaagcaaaacatcccgataatcgaagttaaacatctcaatgaataaaaaaatcattgggatgtttttttattatccgtatctttgcagcatgaaagaatatcgattgactgactggttacctactaccaagaaagaagtagaacttcgcggatggaatgaattggatgtcattctattcagtgctgatgcatacgtggatcacccttcttttggtgctgccgttattggacggattcttgaagcggaaggtttgaaaatagccattgtaccccagcccaactggcgtgacgacctgcgtgacttcaagaagctgggacgcccacggctattcttcggcatctccggtggatgcatggattcgatggtaaataaatacacagccaacaaacgattgcgcagtgaagatgcatataccccggacggtcgtccggatatgcgtccggaatatccttctacggtttatagccagatactaaagaaactttatccggatgttcccgtagttatcggaggaatcgaagccagtttaagacggttaagtcattacgattattggcaggacaaagtgcaaaagagcattttatgcgacagcggtgccgacctgctcatttacggaatgggagaaaaaccacttccagacctggtgaagaatatgaaaagtctgcttactgctgaagagccagtactgacaagcagtaaattcagaacaatcatcggatcagttcctcaaacagcctatctttgtcgtgcaacagaatggacctctgccgaagatgaccttccactttattcgcacgaagaatgtctggcagataaaaagaaacaggcaagcaatttccggcatatcgaagaagaatccaacaaatattcggcttcccgaatcacgcaagccgtcggaaacaagatagtagtagtcaatcctccatatcctccgatgagccaggaagatctcgatcgttcgtttgatttgccatatacccggctacctcatcctaaatataaagggaaacggattccggcttatgacatgattaagttttccatcaacattcaccggggatgtttcggcggttgtgccttctgcaccatttccgctcatcagggaaagtttatcgtcagccgtagcaaagagtccatactgaaagaggtgaaagaggtcatccagttacccgatttcaaaggatatttaagcgatttgggtggtccttccgctaacatgtatcagatgaaaggaaaagacgaagctatttgcaagaagtgcaaacgaccgtcatgtatccatccgaaagtttgcccgaatctaaataccgaccatcgccccttactggatatttaccgtgcagtagatgccttgcccggaataaaaaaatcgtttatcggtagcggaatacgctatgacctgttacttcatcaaagtaaagatgaagcgatcaaccgcagcactgccgagtatacccgtgaattgattgtcaatcacgtaagtggtcggctgaaagtagctccggagcataccagtgaccgggtattatctgtgatgcgcaaaccttctttcgagcaatttgaaacattcaaaaggatattcgaccgtatcaaccgggaagagaatctacgtcaacaactgattccgtatttcatttcctcgcatcccggatgcaaagaagaagatatggcggaacttgccgttatcactaaacgtctggacttccacctggaacaagtgcaggacttcactcctactccgatgacggttgctaccgaagcttggtataccggattccatccatacacgttagaaccgatattcagtgctaaaacccaacgggagaaactagcccaacggcagttcttcttctggtataagccggaagaaaggagaaatatcatcaatgagttgagacgtatcggacgttctgacttgatagacaaattatacggaaaacgctaattcgctccattccatcacttacaaaaccacctctaaaaaggagccttatcaggatcttggcgagtatcaaaaacagcttccacaagaatctgcttttcaagtacccgataatagaccttgaaataatcacaatgaaaaacacgtatattaggtacagaagtagctttatacatataaggatatttagcgactaattgcaatacgtctctcaccattgtataaatggaacggctatattgggtatttccatttctcacattatagaaagtcagaatttgctgaaaaacaatagtcgctgtttctgtccagactatttttaacttagccattgttccaccagcttatccacatcttcttgagtatgcaatctaccctcctcataatctttttcagaatgcattataatttcctgttcatattctgtaggaacataaagatttgcattaggagtagttacatgataagcagccactggttcattgacctgtggcaattcattatcttgaggtttatatgatttcttagccatatcagttattaagttatatctacaaagataaagatccccttggtataaaacaaacaattcctcgcttatcttccccgaaaagcttatttattcttctttcacaggcaacgccacaatctcctgcaacacactgactgccgtctccacattagttacatttttaatcaacatactccgtctgccattctgctcacgcagatcacagcgccgagtatacttcatcatatagtctatcactttaccgaaagccttactttgatagaacggactatccggattggaaacaaagaacaaggtcattcgtccgcctttcaggaaaatcttctctgctcccaaacgcgctgacaaacggcgtaaaggaacaatgcggagtaattcttccgtttcccggggaaccggaccgaagcggtcttccaggcgggtgcggaaagcttccacatccttatccaatgtcagtccatccagttcacgatagagcaacatacgttcgctgctgccggttacgtagttggccggcaataaaagttcgaggtcactttctacctgacactcctctacaaattcttctccactaatttgtccttcaccttttatttcatcagcatacagttctgcaaattcatctgttttcaactcatggacagcttcagtcagtatcttctgatatgtttcatatcccaaatcagcgacaaagccactttgctcggctccgagcaaatttccggctccacgaatgtccaaatcctgcatggcaatatgaataccacttcccaaatcactaaagttttcaatcgcttgaagacgtcgtcttccttcagctgtcagactgcccaacggaggagccagcagataacagaatgctttcttgttactacgccctacccgtccacgcatctggtggagatcacttaaaccaaagttttgcgcctgattgataatgatggtatttgcattcggaatatcgataccactttcgatgattgtggttgccaagagcacatcatagtcatagttgacaaaatccagaataattttctccagttctgtcggttccatctgcccgtgtccgattgctacacggcaatccggaatatggcgctcgatcattgctttcagttccggcaagttcgcaatccggttattgacgaaaaagacctgcccgttgcggctcatctcaaaattgatggcatccgttatcacttcttcattaaaagtatgcacttcggtctgaatcggatagcggttaggcggcggagtggaaatcacgctcaaatcacgcgcgcccatcaacgagaattgaagggtacggggaatcggagtagcagtcattgtgagtgtatctacattcactttcaactgacgcagcttttcttttacggaaactccgaatttctgttcttcgtcgacaatcagcagtcccaagtctttaaactgaacatccttgcctaagatacggtgggtacctatcagaataccgacatctccatccttcagtccttttaatacagctttggtttgtgcggcagtacgtgcgcggcttaaatattccacccggcatggcagtcctttcagacgttcgcggaatgtttgaaaatgctggtaagcaagcaccgttgtcggaaccagaacggccacttgtttattatcggcaacagctttgaaagcggcacggattgcaacttctgtttttccaaatcctacatcgccacagaccagacggtccatcgggcggtcactttccatatccgctttgacatcaatcgtcgccttactctgatccggtgtatcttcataaataaaggatgcttccaactcacgctgcaagaaactatcgggactataagaaaaccctttttcctgacgacgctgcgaatacaattttatcaaatcgcgggctatatccttgattttgctcttcgtacgttctttcagtttctcccatgcccctgtacctaatttgttaagccggggagcctctccctccttacctttgtatttggaaactttatgcagggaatgaatggaaacgaacactacatcttcattctgaaacaccagtttcaaaacttcctgcgtagtatcaccattcggtatacgcaccaaaccggaaaaacgtccgataccatgatcggtatgcaccacataatctcctggagtaaactgattcagttcttttaaggacagtgctacttttcccgaacgggctttatcacttttcaggttatatttatggaaacggtcaaacaactgatggtcggtgaagatacagagccgtagtgtgttatctacaaatccttcatgtatggtacgctctatgggagtaaaattaatctgatcgccccgatcttcaaaaatagccttgatacgatctgtctgcttcatactgtcactacagatatatagcgaataacctttttccaaataatctttgaaagaagaagctaccaaatcgaaattcttatgaaagatgggttgggcagatgtattgaaagtaacactggcattcggcgttccggttggtttgttaccaaattccaatcggcggaaatcgagtgcccgtacagtaaattcactgccgtctatcaattttccctccaatgtaatgcctccattctctgcggcttcctggacagctattgcctggggagtcaacgcttcatcatgcaccacctggattcgttcacgcaaccaaagaaaatcgcgcattgccagagtagtatctttcgggataaaatccagaaaggaagttgtcacgtctcctgtcactgctaaatcgggaacaatggacactccacttttcttctcgcgggataattgggactctacttcaaaggtacggatactttctacttcatcaccaaagaaatcaatacgataaggatattccgaagcaaaagagaaaacgtcgataatgctaccgcgaacagcgtattgccccggttcatatacataatctacgtattcgaagccataactatgcaacacatcagtgataaacgtggtatccactttctcccctacattcaatttcagggttttatcgctcaattcctttcgcgacactactttctctgccaatgcatccgggtacgtaacgatacatagtccctcctcccttttttgcaagcggctaagtacttccgtgcgcagaatctcattggctgcgtctttttgcccatatttaatagagcgacggaatgaagatggaaagaataacaccttttccgtacccaatatctgcgtcaagtcatgataaaaatagccggcttcttcaagatcacctaaaataaagacaaacggacaaccactctcttgtaccaatacagaagaaaaaagagaagcagcagatgcacacagtcctccacaaaaaacagtctgaacagaagtgtccttcaacaagcgcttcattactgccatattggggtgggcagcatattgttgttgcaattcagttattgtcatacctataaaatttccccgcaaaattacaaaaaagaatcgcaggacagacataagtgtgggaaagttttcatccccccaaagtttctcaccgagaaacaaagtgttccacaccgagaaacaacttgtttcacaccgaggaacaaaccgtttcacaccaagaaacaaaagattgccttctgctcttcacgttaaattttccttagttcggctataactaaaggaaaagaactacttttgttttaaattttatagtatctatatgcagacatcggatagcattgtaattatccctacctataatgaacgggagaacatagaaaatatcatccgtgccgtattcggccttcccaaagtattccatattctggtaatagaagacggctctccggacggaacggcaaccatcgtaaaaaccttgcaacaagaatttcccgaacggctttttatgattgagcgtaaagggaaactgggattgggcactgcctatattaccggatttaaatgggcactggaacacgcatacgagtatatctttgaaatggatgccgacttcagtcataatccgaacgatttgccccgtttgtatcaggcttgttcggaacagggtggagatgtatccatcggctcccgctacatcagcggagtaaatgtagtgaactggccgatgggacgggtattaatgtcgtactttgcctccaaatatgtgcggttcatcacaggaatacccgtacacgacacgactgccggatttgtctgctaccgccgtcaggtactggaaatgattgatttggatcatatccgttttaagggatatgcttttcagattgaaatgaaattcaccgcttacaaatgtggttttaaaatcatcgaagttcccgtgattttcattaatcgtgaactagggacttccaagatgaatagcagcatctttggagaggccatatttggtgtgattaaattaaaagtaaatagttggttccataaattcccgcaaaagtcatgaaacgtacactgattcaaaacgccgttattgttaacgaaggaagaaaagtactgggttcagtagtcattgaaaatgaaaagatagccgaaatattggtgggtgaagaaaaagcaactgccccttgtgacgaagtcattgacgcaagcgggtgttatctcctgccgggtgccatcgacgagcatgttcatttccgcgatcccggactgactcataaagctgatattaccacagaaagccatgccgctgcagcagggggtgtcacttccatcatggacatgcccaatacaaacccgcagactacgacgctggaggctttggaagagaaattcaccctactaggtgagaaatcagctgtcaactattcctgctatttcggagcaacgaataataactatacccagtttgcgcaactggataaacaccgggtttgtggcgtgaaattatttatggggtcaagcaccggcaatatgctggtagaccggatggcaagcttgcgtaatatattcggtggaaccgatctgctcatcgccgcccattgcgaagaccagggaattatcaaagaaaatacggataaatacaagaaagaatacggagacaatgtacctctggctcttcatccgcttctccgttcggaagaggcttgctatcgttcgtccgagctggctgtgcaactggcacgggaaacaaatgcccgcctgcacatcatgcatatttccaccgctaaagagttgagtctgttttccaacgttcctctggcacaaaaaagaattacagcagaagcctgcgtttcccatctactctttacggaagaagattatcagacattgggtgcccgcattaaatgcaaccctgccatcaagactgcacaagaccggaaagccttgcaagaagctgtcaacagcggtctgattgatgccatcgcaaccgatcatgccccacacttgcttagtgaaaaagaaggaggtgcattaaaggcaatgtccgggatgccgatgattcagttctcgctagtcagcatgttggagttggcagataaaggagtgtttactatcgaaaaagtggtagaaaaaatggctcatgctcctgcgcagatgtatgagataccaaacaggggattcatccgcaaaggctatcaggctgacctggtattagtccgccccggaagcgaatggactgtaacaaccgattgtattctaagcaaatgtaaatggagcccattagagggacacacattcgactggaaagtagagaaaacatttgtaaacggacatctgttatataacaacggagaaatagacgagacttatcgcggacaagaattgttcttcgaacgataaatgataattttgcggagtgccctgaaagggcttaattctatagcgtagggcaacgccctacgtaaaaacgacaatctgaatttgcgccctgaaagggcataattgtatacagttccgccctttcagggcttgtg

SEQ ID NO: 8266 - DNA, 21953 bp, Unknown
  gut microbiota DNA sequence
catgtttccgaaaaagtattttcggaatacgaaaaaagaaaagctgcctcgtccattcgagacagcttctttacttgctccttacttatgtttactctatgagttgctacacgtttatttttacttgttccgcgagctacgtgcagacggcacgttctatgtttttacgtcattccgtttcatacctttttttcaggtatgccaagccttttccagctagctaatccttttctgccttgccgtttctccggtggcggaaacgcagaactgcttcaagaatatccagcaacttctccaataatagtctcatccgttttctttttaaaagttaataatccgttttatgtccgttggattccgttttatgtccgttggaatttgacagccaaccgtcaaccgtcggtcatgttcgggctttagtttgcccgacaaacttatcagttagtccctgcggattcagctgccggctgaactcccggttaagctgccgggtccggcgcttctccgcttccaccaccaggtttattatcatcatccggttctttgtcaatgacatcgtcggccacaaacgaacccgctacatccttgatgtgcacaaactccaccccggtggtcaacgcacgggtagcacttccgttggcggcacgggtgtattcgggagtaaactggcaacgcaatgaagtgatctgcgaactgctgaccttattttccagctctaccccttttccgtttgccttggcaatcatagtaaacgtccccaagccttcgaggcgcaccgtgcggctattgagcaactgttcacgcatcaccgacatcaggttacgaatcacgttatgaacatcacccgccgtcagcgaggctttttctgcaatcaattccgccattttctgcgtattgaccattttcccgaatttcaccagacggggataataaagtttctgtccttccttgttggcaagcgttgcctgatacggtttgtaaattaatggcatactttttttcctttcttctttttaatgattaatgaataaattttatctgtaaccgattacgaaggcaaaagtatatgaaaggaaaaaagcaaaggaacacgacgtgacaactcgtcacaagagacaacaaaaagacacaatttctacacgagctatgccaacagaggcttctgtacaaagcagaaccacttggcataaaaaagcgtatcttcgcattcacacaggataaacttaaaagaaacagataagttcctgtcactgattaattgctattttttaggagtaatccgtgcctaaattatgatataaacgaattatgatataaacaaattatgaacacctactaataatagaaagtatcgacaatgaaaacagaaaaaacagcaacctccgtcaacccaaaagaaatgccggagacggcaaactctccccgcatacagacttacagcaaaagtcagctggccacactttatctgcctcacatacagtctgcctcggcacgccgcaccctccgcagttggattgcccaaaatacggaattacaagccgcactcgcccaaaccggctacagtgaaaaggcaatcttacttactccggctcaagttggactatttttcaagtttttgggagaaccctaaaaaacaaatacgatacggaaaggaatgaaaatagagtgatctgaatggatatttgacatcgtagtgcccgaacaggatttccctccggcatacaagtaattttttagacacgaatgacgcggatgacactgatgacacgaatgacacggattttaaagctgtacagctattttaaaatccgcgtccgtcatccgcgtctaaaagataaattcataaccgggcaagaatatcgcccgaagccgccttattccgagggttcttctcccgacggtttcattaaatcggcagtgacctccgctttaaaacggacaccgtcatgaaaccgcagattcagtttgacagttacattcgtttcgctgttacgctgcacataaaacgtccctgtgacctttttatactgcgagtaataataaattggatcttcgtagataaaaacatactggtcgttgtgatagagcgaagaagcatccaccacctgcccttcccaatacaaatgaagagaaaaaacaaaataagtatcagcctttccttcctccatcttttccggcgaaagaacacaagttaaatagtccccatccacagaagccacaccggacacaatattattcgccactccccgaaaagaataagtaccgatggaaggcacttcctccacgcccggtccgggagttaccgaatcattatcgtcgctgcatccgacgaaagccaacagtagccccgacaaagcaaacaggttcaaatatttcagtaaaattttcttcatgaatatacttcatttaatcattattctattacggtcgtcgcccccttatagtaaccggacaagctgctattatcgtactgtacaatagagaaaatattgaatgtcatttcaatttcactcccttgaagagccacagaagcattgccgcctgcagccaaatgaccgttcgtcgtattagcctgattataagtgactccttcgtaggcgatcgatatcttcgcattttccgcgctaccggaaaatccgtgaacagctccctccatcatgctcttcggcacacgtaccaccgcatccgctgccgacattccggctacggtagtgatacctgcctgccgggaaatataaataacgcaaatatccacatccgtcttatctaccactaccgactggatagtcaccggagtgccgcccgcccccaactgatattgattcgggatcgtcgtatcatatactttgaaagtaccgttgtagttgcccgatattttaagactattatctcccaaatatttgaggtcgagcgtcaacgagtattcattatccgccgatttcgacacactgaatgtacctgccgcgtcttccagatgtcctttagaaacttcgattctttcttcatcatacggattataataagtaaactcaaaagccagattcgtagttgttatatctacctcctgtccgtccagtcctgtattcggaacaaaaagacgtacgtaatatgtatttacattattcaaatctgcagcagatgaaatccctgacggagtgagatacaaggcaactccttcattggtcttttcatagaaggtagctttgatatcacgtgtactttctccattcagagtcaaaatattggtggtgctttgctttatctcggtgtaattaccttcataagaacctttgaacttttcgcccgaaagcaacgtaaaactaaaggttacctttatactctcttctgtcttttcgactttgagcttaccagccgagcacacatccgcccatccgtaaggatctactgcgtcaatatcatccgctcccaagttcgtcatgttatagaaagcgtactccacatcttcaccagcggtaatatcgatttcttgtccgaccatttcgggagtaacagccagcatcagatattcggcatccgatatatcctccaccgtagtcaagccggcctccggacttaaataaacatattggaaacctcctaacgtagtagccacaaccgacttcaacgtacgtacctcatcgcccagagaatattcgttcggaagcttttccggagccttgtaagcgcactccgcctcgcccgtaaatttaccgccacttttcagtgtaaagtcgaaaacagctttcacggccgatgtctcattttctcccggtgtcattgtcacggtgatcttgccctgtgtcaacacgtctttccattcgtcggggctaacggtgacaatggcctctccgtcggcatccatgtaataaaccacataagtgtcgtcatcagaaccgcctaccgtgaccggattgcctaccagactcttatccactcccagcattacatattccttaccgctgctcataaagtcttccagcgtttccagactttgcaacggactcatacatacgtatataatgccctcctgttcaaagcaggacaccgatttcgcttgtatcgtcttatctttatacgtatacgtattaacagtttctaccggctccggttctggctccggttcaggctcgggcgccgggtcatcgctactacatgccacaaaacaactcattgttaacatgaacaagaaaaaggaaataaatctagttttcatatctctcatttttggggttaattataaaatcgtgtgattaaaaaaagaatacattgacgggagtatcctgcgagtaagtggtacgcacatgatgcgggtgtgccttatcacaatcgataaagtcaatagtcagcgtatgtttgtcgccatcgcgtgccacggtcatcgttccgccgtctatacgtgcatattctttcatggttccgttggatattttctcgtaccaggttccctgcggatatgtaaatacattgggataacccgaagcaatgcctcccggtttcaggaattcgcgcggaatgcccttcgattcttcgtcacgtgccactaccttatacgtaccagccggaataccttgtgtcacatccgtagcccattctacaaagaattccactttcagcactcttccgtcgcctgtcggccatgtgtcggtaagtcctacaccgtcttctgccaggtaaagttcgactacccggcacgattcatcttgcaggtaataagaatcgcccttatcttgcagacgggcttgtgtccattcgttcagggcgagatcggtggtcagcgtagagttcggagtttcttccgtgctttcgtgacggtcgatagtagtcagttttcccgtgtaggtgaaataacgtttgagcgacaagtcacctaccaacgtaccactaatcgtatattcgccgccgtcactccgtttgacagtcattttacctccggataggaggtcggcatcaacgcttgtggagtacgctttcacgtcaccataaaaagtaccgccaggcacttccacttttccggtcggcagatccatctggttcatgtatccgaggttgaacgtccattcattaaacgtatatccgttcggtgccgcatcaaaggtgctttcaggaagcggaaactccgtggttccgggagcaaacggcggaacattgaggctgaacgccattatcttgcccggtcctatcggattaccggcagcgtccacttccatatccgtatacagagtgagcacaaagtgatccgtccccactccgtcttcgtctccccagtataccaagttggagttgacaaactctacggtttcaggagtaggttttccattttctccgccgggtttttcgccctccggattttctgtgtcattgtcgctgcaagaggccaacgcacacgcagacacaacagcgaacaggcaaacacctaataaattcattaattttaatttcttatccatataagagttattttatatcgttacatcattaaaaagaacttccgtagtgcccgcgaaggcaataaaaaaggcagggtaatcccgggaaaaaaactcccgttctccacacgggtagtcctccccgcctgtcatatatgtaaagttaaaattaagagagggtcattaacctctccttccgtttcacaacggtagttcttttcttcatacatctattccggaaacgttatatccggttgattcattagttgcaagtttccaactatttaaagagcgcaatgtcagggaaaagaatatagtctttcaatgctgcggtagaaaattgctgtccgtcgaatagtgctatcgcaagataacacccgctctccggtgcaccggttacatcctgataactcatcccgacagaaccatcctgataaagcaggggagcaaatccgaaattacctttcgcataaatattggaggaagcagctacggaaaagccgtataatgtttgtaaaaccacctcctcttccagtgctgtattatcagccgtcctgctattggctgtttcatccacctcctgcgtcagaataaaatctttctgtgctgcgccgataggaaccacaaaagccccatcctcgtaggtagcctgcaatgaaatcgtagccttcgaaggatctttcaaatactgcaccaccggagtaccgactaatgacattttaatagtgtagccatcaccttccgcatctttcgtcacctccgtagccgacaaagaatatgccttatctatctttttcttatcccatttcacataaatctgactgctctcccatgctccgagcaggtcgctcgcttcatactggtagacataatagaaaaacttccgtccctcattggtactgaccatcagttggcaagcacgcggatttccggtcttgttctctttcaatacgagcaagaagccttcttctttcgaggctgaagggacttccacccagtcgattcctttctgtacactcaccttgaaatcgaacgagctgttgacccgcaccacggtttgtgaaggagcattgccaagccgcaacacctgttggtcggtatcgggcgcaaaaatattaccagcctgtgtcaccacaatcttctgttcgttgctaccatcgcttacggtcacttgcgtggcacgtgacacatattcataattagccctggcaagtaatgtgattttctcgtttgtcacttcgatcaccctacaccagtccgcaccggaaacagccgtcagttccccggcagcctgcaaagccacttccaccgttccaccgccggcagccagatcgacatccgtgtccacgatgcgtaagccctgcggtgtttcatcattatccgtgccgcacgctgccatcagcaggcagcatacagacaatacgatcataaataacttgttcatcatactattcttctattgtttttttaaccaatctgatggaagcaaacgcatccgtgtatccgatgaaagccgcgtcctcctcctgcgagttgtacactccgaagatgaatccggaaacttctcccatccagactccattgtccaccaggtaaatgccgttagtggtagcataactaatcagtccgatagactcactacggagcacataatcgttcattacgtcccacatagccagataaacatatccgccctgcacctttttgagaagctgcggggagacggaaagtccgccgcgcggcttgtcaaacatcaccagaatatcatattccagccccttgagccagtaactctttccgtcttcgttcttcaatagccggacttcctgcgaggccacttccagttgttgcgtttcatcgttcaggcggtaaaaatccatctgataagtgcccggataataatcatagctttgatatccggcagtgtagacacccgccaatttgattcccgtagccccttcgtcggtacagacaaagctgataagctcgttcttccagacaaaattctgcatcgtctgaccgtctatcgttaccggttcatgaaaacgcattccgtcggcggtaaacataaaaggcacagttttttgatgcacttttcctatttcgtcataataagtcacgataaacgtatagttgctgcgcagcatttgccccgtgtagagtccgtccatcagtaagtcatattcataaaagaaagcatcgtcctccaccttttttattttagtgagatattgcttccacgtctggtcttcggaaagtgccttcatcacaatccggttgccgtattttttgcctttcagttcgatacgctcggcagaagcactcgaaataataaactcgtagtcacctccgagtgtcccgttcgggtcgtcagacatacttccctgcggctgcccgaaataatgcaccagataattataggtatcgaatgacaacatcgtcgcctgttccgacttaacgctatagagcgagctgaccgtctcatctgcttccgccatttgcgaagccattgtcacccgctgcccgtcgaatctgcaaagcagggtgatgcctccaagcgaataatccttgccgacgtaatattccatcacccagccattcggtgctcctttcaaaagttcgccgcaccggttcacatcggctgtggcacggttggcagacgaatcgtcaaagtagttctcctcctgaaagaggcatgactgcaagcccagacaggcaagagccagcaagaggtatttcgttatattcttcttcatagtgataatatataatttaaattcatactcattgaatcgtacttaaatcaatttcggtaatctcttgctgacgacgcagcacgattttacgcagttcgttcaagtcgattccccaagtgtcgcgcatatagttgtaaacaatcgtaaactttttattgatagtagctgcgcccgtttctccggctgccttcagcatgttatcccagtaggtctgcgtgtgggtgacgtacatggctatgttttccacgaaatcctcgttcgcctgattcatggcataggcggtcacgaagccgtcgggccacgctatatcgtttgtacggggcatggctccctctgcagtcatgtagtagtaccagtcggctcccacatatttcccctccgagatccggttgaaagaagggtcgaagtttcgtttctggtgcaggatatgagcgaactcatggtgcatcgtttcaaagtaatagtcgttcagtttttcgatattgattttcttcacgttgaggtcgttcacgttgtaaagcgtgattttctttccgccttctgccgtgccgagtaccatattcccgctactttcgtaagcaggcgatccgatgagatgaaaggttttaggcacgtatacgcggagaaaatcgattcccgccatttctacataagcgtccatccagacgtgcttgatgattttggatagtgccaccgctttatcatagtcggcaggcacaaggttgtatttatggtcgctctcgatgtccttcatgcgatacatgaaatcgatgttgtagggatatgtgtagttgtcgagcaaccaatcgtcgaaagcgttcctctccaccggatcggtggagaaaatgctgtgcgcggtgtctatttcgtcgtcattgttgcaagcccccaggcagactgcggtaagggcaagcaaagaataaatgagctgttttttcataacttccactttttttctttgttaatttcttctcgggttgggttgtattcccgccacgatcacactccgcggaatttggatcgcgtaacgcaagtcgttcggaggcatttcgtcggtgacacgctggttggccatatcacggcgataaatcaggatgccatatcgcttgatgtcgggccagcgcatcccttcgtgcagggtggtgatacgacggatatgcaggatgcaatggatgaaattttcctgcattccctcttcaatcgtaaagtcgggagccagttgctttttcggtgtctgttgggtgaagggggtgtaaaaactcatcttgttataataggcgttgatctgttcgggtgtcagcaccgatttgttgcgggtataggcacgttgccaactcgtgatgtcggctgccgactgggagtacattttcttcagcgcgtatgcttcggcacgacagagcaaggtttcatccgtagaaaacagtacaggcatataataaaggtatgagccctcataaagtccgctcttacgcagaatactggcaacaaacccgttggtggagaaaggtttcagatagaaataatccgaactgccccacaaccctgacgacagacaggtttcgctcgtggcgagcgtctggttgtggaagtaacgcggacctatcagatagtcactcccgattgctccccagttggaaacagtgctgcttatcaacaggttggcttcattggaagaggcgatataggcatctgcctgcacatttccgttcacggaaagattgcccaacgcttcccagttgcgcagcaggtcgtcggggttagtccccaatacacgggtggcaaaatcaatcacacggtcgcaattggagaaatcgggcttcatataataaaggtagaaacgggcggcaaaggcataagcggctttacgggtgaagtgatatttgggtacggagtagctgtcgtccgaaatcaagccgatcccttcgaggaggtcacgctccactttccggtacacttcttccaacgtgccccgctcgtaacggggagatacggtggtttccacctcttccatataaggcactcctaaagattgggaggcatgagtgtcataggcgttgcagaagatattcgccaacatgaaatggcagtaggcacggcacacgagcgcttcgcccctctgcgggtcgagcgacgccggatttcctttttcttcgatggcatcgagtgccatattggcggcggctattgcgctgtagtaacctccccaaagagaattgggcgtgtcctgatattcttccttggtatcttgccagtggtagcactcttgttcggaaagcttgtagtaaccgtaggtagggccactatcatcggagttatcgctgtaaagctcgaatagttcgttgggcgacacgtcggcatacgccgatacaagcagtttggctattttctggtcggtgttcaactccgtacggttgtccggcatttcatccagaaagccgttgcaggagacggcagtcagacctaaacttgcggtcagtaccagtgcagggagtatatgattgttttttttcttcatctctcgtatattttttaggttgattttctattctttacttacagtcccaggcgcagggtgagggtgaactgtcggggtacgggcgatgctacaccgccggtattcacaaattccgggtcctgcccgttcaatttcttgtcggcataaatcaggaagaggttggtggcctgcaacttgagcgacaagttggaaattttggcaggagcaatccagcttttggggaactcatacatcagtgatatttccttcatacggatgaaatcgcctttggcaatacgttccgtggagtagttgtaagcattgtaagcaaggtatagcgaggtattcgcctgatattgcgggtcgcttataatcactggtatattggttttcgcctcatcgccggagaccgtccaacgattcttaaactcacgcggcatggcggtgaggtcggagtatttatagttgaacacagggtccaggcggactacgttgccgaaagaataggtcataaagacattcagtttgaagcctttgtaagtgaatacgttaccgaaacttcctgtgatagtggggtcggtaggaccttcatatttcagataatcaagtttctcccgttcctgaaagttgacaccggtggtggtcagttttccgtcgatcagatattgtggaataccatcggcgtcgagccctgcaaaagggatggaaaacagtccgcgcacgggatagccttcacgggcgaaaccgttgccggatacaagttccatcatgctggtgagtcctttcagttgggtcacttcatttttggcgtaggagaagataaagtccgtgttccacgaaaaatctttcgtgcgaatgttgcgggtggaaagggtgaactccacaccgtgggatttcatcgtggctacgttggcgtatttgttgatgaaaccgcctactccctgcgtgggaacgacaccgatcaggtcgtagttgttacgctgataccagtcggcagagaagttgatccggttttcgagcagaccgaggtcgatgccgatgttcagttcatgctttttctcgtaggtgagttcgctgttctcaatgtcctcgatgtaaagtcccgtttcctgaatatcggtaaaaggacgatagggagagaaactgcggatgatggcttgcgagttggttacttccgccggaccgcgatcggcggtaagagagtaagaagctttcagagtcaggttggaaagagtgggttggagcgctttgaaaaaagcttcctcgtgcacgttccatgcaccggacaagttccacgtaggcagccagcgtgacgaacggctgcggcccatgcggttggttccttcgtaacgaaacgtgccgttgagcgtgtaacgcccgtcataagaataggtagcgttgagaaagctcgcaatgctgcgggtttcggagtgccccagactgtaataacgcgaaccggactcaattccgttcttaaaaaactgatagacgtaggaagggatttcccccatcgaatattgcattccccagccctgaaaggaagaatatgcctttttaaggctgttcacttccataccggcaaagaagttggtgatgtgtttttcggcaaaaaggtgattccacgagagggttccgcggaaatcgagccccaacatacggcggtcctgacgctggtagattcccccctcgggcagcagggtgataggcagggcgtatggattgtcggggtctttataaagcaatccgttttgttcgcggatggtggcatcgtccataccggtacggtaggcaacggcttggttggcatcgtcgagcacgttgtgttcctgcgacgaggtctggtatctcacagctccgagggcacttaattcaagtccttgaatcactttccatttcagctcgccttgaaatttcacatctaccatgttgatttcgatgtagttattatccagttcgtgaagaatgttgaatggagcgtagttgctgatataatccgcagacgggtcgagcgtacggctcgtattgagcgcgtaagaataagggttgatatcgaatccgcgtgacatctttccggaagcgatgtcgaggctggagctcatcgttcccggtgcgttttgctgacggtaggaagcgttagaaatcaggttgatcgacaggtttttataaagattataggtggtgtttacgttggctgtgtaacgcttcactttgctctgcttgtaccagcccggatcaagcatagcgctcaacgaggcatagaaggatgatttttcggttccggcggtgatgctgacggaatgattctgcgaaatggcattggtgaaaagcacgtcgaaccagtcggtgttacgcatttccgcttcacggagataagcattgcgggactcgggggtgttgagaagtccgcgctggccgttgctgttattatactcgtcgatgagacgatacatacgaccgtacactcccgtgtctttggtacggaaaaggtcggcactgttcagccagcctttctgctccatctctttatagatacccatctgttcctgcgaattcatgatattgaattctttgtaactaggtatggcacgggtggtaaactcaccggtataactgattttgctgactccggcacggccttttttggtggtgaccacaatcacgcccgccatcgcacgtgcaccataaatggaagttgccgatccgtctttcaatatctgaaagctctcgatgtcgtcggaattcaacccggctatggcggaactgattaatgtctccgcatcaccggaggaaagatcgtcgggacctacgtcgatggcatcttcaagaatcactccgtctactacccaaaggggcttggaacttccgtaaatggaagtagcaccgcgcacacgaatcttaggagcggtaccgaaagtacccgaaacgttctgaacggaaactcctgccgcacgaccttccaagccgcgactgatgtcgggcagaccgtccagtttcacattatcggcatccaattgtttggtggctcccgtaaacaggcgtttgtccatcttttgcataccggtcaccaccacttcctgcaatacttcggagtcggatttcatcatcaccttgatggtccccggcttaataggaacatcctgcggcttcatgccgacataggtgattcgcaaagttcttgatgaacttatacgtttcatagcccattcctccgcaaatatctaaatataaagtctttaataaatataaaaaagaagataccaaaaaagaatacaagcaaacaaaagctgaattataagataaaaataatcttccttttttgcctttaatctacttttttcgtcttttaccggtttactgaagaggtagaaaatatcttttatataatgacctttccagttcccaaatagcttttatcctgaactccaagtgacaatataaaagataacggtcacgaaattcataatcttcccgaaaactatcctttttctaccgatagatgctaattaatgatttttcatgtgttattaaacatcttatcaggctattttatcacatttaaatatcaaaaagaaacttcttttgaattattaaccatcacaaaggcatagaaattcacttttacacactcgtttcatctgcatttctttttcatcaatagtattttgtctatacagttcaatttcgcattttttttcatatttttctttgtttttctaaaaatgtgcttacttttgcaaataattaaataacaaaacagactattctactatataaaaactatatgaaaagaaaactaacgctgttattaacttgcttattagcaagcattagcctgacaattgcccaaacctctaaaaaggtaacaggcgttgtcttctccgaggaagacaatcaacctgtcataggggcatctgttgtaattaaaggtacatctatcggaactaccactgaccttgatggaaagttcgtgattagtaatgtaccaagttcatcaagaacttggtaatcattagtccattccttctattttcgtctttaattctactttttattgttcctctttctccctatctccttccttttccataggatccttaaccagttttttggaggtatgaaatcgaatttcaatgtctatatggcagtcattatccaccgtgcagtctatatctgctgaatcgtcaacaattagatttaaaacatgacacaacacttcgggaaatccgggaataaattcagactttccaatgatacaagcagaataattatgaatagttgtccaatcggggataggactctgaccgtcaaatttacatttgcacatacgtcctattgaagagcgcgaacaattcgaatggttcgccacatatctttccggaatattattcaactgttctatcttaaaaatacgatccaccaccgctttcttcacatcgtcgtcactatgacggacaccggttgttttactctgtttatctctactttttactttaaatttcttgctttcctttttcataatttatttttatattattccacaaaagtccgatatttcttttaacatttgtgttcaagcatgacacattcgttcttattccatgaataaatttaaatatggatagatttggaggtacccattttctacccaactgccataatcaaaaaaaaaaggtcgaatcttttaatgcatcgactcattcaagcatgacacattcgtatccattctttttttatgcgtcaagcttggacaacctttacgcaactcatcttctacctttgccaccgtaatcaaaaataaaccgaataaaaaaaatgactgaaatcaaaaagaatcattcacttcaacggatacggcttatgaagcaggccgctgtcatccggcaaagtaatggcatgagccggcacgatgcactcgtcacggctcaccggataggaaagcttatccgacaaatgcatcacggaaacgtctgtttccgatataccaagcaggatggaaccatccgtcgtgccaccggcacactcatcggctacgaacatagtttccgccgcccgtacacaccgaaaccggagaacacatttgtcgtctattacgacatcgatgccaaaggctggcgcacctttcatgctgaaaattttctggatatcgaagtggaatgaacctacaagaaaaaggaatgaatcagcaagaacgaaaagagtgggaagctctttgcagacagtataatgtagactccctgcaagaagcgattcaaggctgccgggaagaattagaatttctcattcactgtgccgaacggctcgaacctcctacagagcaagatgaagacagcaagaaacgccgtttaacacatacaagaaacgccgcttttccacactaggaagcgccgtttaacagatgcaggaaacgccgtttctccttgccaaattcagagaagcgactattttttaacagagtataattttattaacatttatcagtatcaagtatggaaaattggagatttattgaagaaaaccccgactatatgatttcagatcatgggcgggtattgagtttcaagggcaaatcgaagttaattctttgcactaaaatcatcggaaccggttatgaaacggtatcactcctgaataaaggaatttgtaccgattacaacgtccaccgcttaattgccaaagcatttattccgaacccgaaacatctgccgcaaataaaccaccttgacggaaacacgatgaacaaccacgtgtcaaaccttgaatggtgcgatgcatacaccaacacgatgcacgccatccgcacaggattacgccccaccggaacaggttcccgcaaaactccctgcgccgtaacggatgcgaaaggaatcattttacgtgcctatccgtctatgaaagaaatgggcagagaggaacgtctgaaaccgtcacaccaacactggctcatcctgcaactgaaacatccggatcgtgtatggctacataacctacgtgcaaggcaacatcggggaaacgatttcatgaaagttccctttgccaattcatcggctttatcacaactgcctgtctttttaaactcattggcaataacggatacggctgtaccaccgattcacgctcccttcactccggtgcaccactcggtgacaaagcaatattaccgtcaactgtctgcagaggaggctgccgccttcggattcacctcccctactatacgcaaacaagaaaggaggatttcacaatgagagacaccatcatcatccactgttccgccactcgtgcgggacaggattttaccgctgccgacatcgaccgctggcatcgtcaacgcggcttccgttctatcggttatcacttcgtcgttcgtctcgacggcacggttgaaccgggaagggatgttgccctcgacggagcgcattgcacgggatggaatcatcggtctatcggtatctgctacattggcggactggacaagaacggtcggcctgccgacacacgaacggaagcgcagcgtgaagcacttgtccggctggtagaagatttgcgccttgtcttcccttctctgcaacaggtgataggacatcgggacaccagtcccgatcttaatggagacggtattatctcaccgaacgagtatataaaatcctgcccctgcttcgatgtaaaagcggagtttattcaataattatcagttatttattatcaattatttacaatcagtaatttatcatcatggcccgcatttccaaacccggattagattattttcccctcgatgtcaattttctgcaggacagaaaagtacgccgcatctcctgtcgccaccatgcggcagggattgctgcgctcacttcactgctttgcctcatttataaagagaaaggttattatatttcgtggaacaaagacacgctcttcgacatcgcccaggaagcgtgttgcgaggaggaggaaatgcaggccatcattgatgattgcctggcggtggggctgttcgacgatcttatatataaggagtacggtgtattgacctcacaggccattcaggaacaatatcataaaatcatcaccgacagccggagaaaatacaaattacctctggaacatttctggcttatcaaggaagattttaaagatgtaacagaatcccatgattttgctacaacaatgccacaaacaaaagaggaaacggatacagatatcaaaggtaaacaggaaatggatatggaaaatgagatcaaatctgaaatcaaaaaagacaaagagacagagagacaaggaaaatgccaaaaagagaatgagaggataatgccgcccgttccgtcaaacagcgtttttcaggcttcgcctgtcgttgtagagggtttgtctttggataaatcgattggaagagaaaaaacggaatctattgcggagacggtttctgaaacaatttctgaaacagctccgggaacagctccgaaaacggtcttagaaacagctccgaaaacgatttcggaagggatgcaaacgggagggggatcggaagctatacttctactaaatatgcaaacaatcggtatccggaacgaacagacagtgaaagcgattgccgcccttgcccgacgtaaagaactgggaggtcccggcgggattttatggaaaatccttagttcccaataccgccctaccctgctcaaaaagaacgaaccgggtgattacattctttgggcgctcaatcatccgacggaatttgaaaacacatacaacgggacactgaaaaagctaatcaggggaagataaaccgggaaaaagtctgaatataaaaacgaaacatgccatcatcattcgtttatatcataaattcaggcaaagaaagatagaaaaccaagaactatcgcatctttatcatacaaggaaaaggcctcgacttgtagagccagtatttgtaactcgagaaaccaaagaataaagtaaatcataaaaaggaagaaaaagaacctatcaatttgttattctaaaaaagatttgtacctttgtggtacaaattaccccccttagttgagaaatactaaggctgacccatcaattaaagatgggtttttttatatataacgctatggaagacaaaaagaaagtaatagtctatgtagacggttttaatttctattacgggctgaagtccaaaaaatggaaaatgtgttattggctggatttagtcagcttctttaatagttttctaaagccctatcaagaattggtagaagtcaattatttttcagctcgtccaacagatgcaggcaaacacgataggcaagataaactatttcaagcaaacaaatgcaaccctaaatttaacttgatattgggtaaatacctcaaaaaagagattaaatgccgttattgtggtggtatcattcattcttttgaagaaaaagagacagatgtacgaatagctacaaagattctgtcggacgcctataaaaagcgctgtgacattgctatcattgtatcagcagacagcgatttaataccacctgtagagctgataagagaatttaacccgttacaaaaggtctatgtatattttcctcctaacagatattcatctaatttatcgaacctaagtgatggcacacgtaaacttgatggcgcttttaatatattcaagaaacatatattgccccaaaaagtgcagctaccaaacggatatgtaatagaacgcccgaatgagtggaaataagatttcagatcgacctatcttgccgttgaaggcacgaaaagctgtcttcgagaaattggaagatatcgctgatgtggcttccatgtctccggaagacagggagcgatacgacaatagcgtcaaggtgtaccgcgattatttggtgacaatggatgcagctgaacaaaaagggatgaaagaagggatggagaaagggataaaagaaggcgcccaaaaagcccaactacaaatagcgcggaatatgaaagccaaagggatagacaaccaatctattgccgaatgtactgatttacctttaagcatgatcgaagagttatagagtaattagacaaaagaagttaaaagcactcatcaatccacaatcagccaccctctcttgcaaatatatttgttatttttgcggagtaataacattattacgttccaaaacagatatttggggcatagctctaaaggagacattaattatgggaaacagtttaaaaaaacagaaagaagcttcattggctgctaacaacaccaaaaagagcaaaggtgagagacttggatggaaatcaataagcgaatataaaactgtgtctctcaaagaaattgtcggaaacgggaatcgtgtaaacgaaacaaatattcctgtaaatacaagtataagacttgtaccgtaatgctggataatataaggccttataagatgatatttattcaaaaagcgtcaccaaatgttggtgacgcttttgattttgcatatatttataagttctactcaaacagaaaagatatctgtcaaagactaaaatacattgtcagggttgaagttaccaatgatatttttgccatcaagttttatgctgccagagacaaaaagctcgataataaatataaccgaattctcaaaatgcacaactatacagaaactctacgtatatttatgacttgtgccagcattgtccctctcattttacaaaaattcccactagcttcatttgtgataaatggtgctcaaagtttagatttagaatctaacaaaatagaaggaagagccaacgatcaaaggttcagattatacaaaaacatggctacccaattatttggtaaagaacgttttgaacattacgaatttatagaaatcagttcttacctgatggtaaacaaaaaagagtgttctgatatagagagaaaaaaagacagaattaaagaaacccttcttaacctatatgacatagacagctaaaacaaaagaggtgagttccccttcacagggtagcccacctctttctcttcatacacaaacattcaaatgatcaggtaccagatgttagtcaatgtaacggatgccatctattttaaacatatctccctacatacggccgccacctaaagcctgatacaacgtaatcacaccctgaatttcggtaaagcggttcgccacttgtgacagttgcgcgttgagcaacgtctgttgtgccgtcagcacttccagataagtggtgttgccatgcttcatcaacaggcttgtgctcttagcggctgtttgcaaagaggctacctgcttgtcgtagtagtcggctttctcgcgggcagtctgatactgtaccagtgcctcgttcacttccacacctgcattcagcaaggtttgttcgaacttttatgtaaaggtttgcataacatttcgagaaggaacttttcaatatgcttaaccaaccctaactctacatctctttcgttatattcgtcagtgaaagtcagcatatcaaaaatataggggtcttttaaggtttcttttacctgcttggcttgtatttccgggagagtggaatcgaagttgtttgccaatgccccgtaagtatggtagtagtcctgattgatagcttcaattaagaaattacgactccatccactcttcaaacattgaatcatgtaccaatagcgggctttcaggtcttttacccgttgtattaaagtgatgttgtgtgaccagcttaactgttttatcggaagaacacaatttgacatttctaatttggcaaccactggttgccaaattgtaagctcttgattatattctttatgaaactgaatcatacacctgcaatttcgtggggaaaagcccttcactttcggataatcattcttcaagtcattggcaagctgttcaagtgcattgttcccccatcctatctgcttctggctttcacaaagaagtttgccgatatcccaatacataaaaagcatttcttcattagcggaataaatcgcttttttttgtgcgagtgccacccgtgctttgacttgtttaagcaaagtagcgtagttaaatatactattttgaatttccatttattatttttcgttttagattaaagacactataggttattcctatccaagcatcattcagccgattgccccaaagcaaagagaccttccttggtaatagagtggcaaatataatgataattgaagcattacggatgcactatccgataaatttgcctgccttttccatcatatcaccactttgtcacgagtgcaaatttatatttatccagttggacgctact

SEQ ID NO: 8267 - DNA, 14306 bp, Unknown
  gut microbiota DNA sequence
ttatgccctttcagggcgcaaattcagattgtcgtttttacgtagggcgttgccctacgctatataattaagccctttcagggcactccgcaaaatgatcatttatcgttcaaacaaatattttttctccacagcttgccgataagattcaaccaattcattcatcacctctgccaccgactgtcgacgggatattattgccgagacctgacctatttccagttcaccttcttccaagtcaccttcgaagatacctttcttagcacgtccgcgtccgagcaaagttcttaattcctcggaagtagcaccactatcttcagccttctccaccgcttcacgaaaagcattttttaccaatcgtgtcggagccagctttttcaacaacaacttagtatccccttcaccgagactcaaacaatactctttaaataccggactcgcagaactctcttcagtcagcgcaaaacgtgttcctatttgcacaccttccgcccccaacaccatagcagccagtattccttctcctgtaccaatacctcccgcggctatcaaaggcaatgtggtagcctcacgcacaacaggaatcaaacagaaagtcgttgtttcctcccgcccattatgccctccagcttcgaaaccttcagctactactgcatccaccccggcttcttcacatttcatagcaaaacgagaagatgaaacgacatgaacaactgttattccacgctccttcaaccatccggtccacgttttcgggtttccggcagaggtaaaaacaatcttcactccctcttccactacaatattcataatctcttctatttggggatacatcaaagggatattcactccaaagggaaattttgtggccgcattacatttatggatatgttcacgtaaagtgtccggatgcatagaaccggcaccgatcaatcccaatccgccggcattgctcacggcagaagcaagacgccaaccgctacaccacaccataccaccttgaataataggatattgaatacccagaagggaagtaattctattcataattaattatttatctatgttttaatatgccaaaataccaatgataacgacagagttatataacaatgcgccaacataacaatacacaaatatactaattattcaattacaaacactctcaagtcagtacattacacattgttacatcaacacatcattataacgtcttcagcgtgcaatctgttcgatcggtttatttatcagcacagttgtagaatctccataagttctcaaaacctccaatgtacgggcgcggttatctctgcctttcttattccagaactctttggtaaagacagccatcaggtctagtccaccgaccgttcctccattgatatacactccgctcccaccaaacaagggaataggtgcatccatcactaccgtgttcaccatcattccattggcacgttcgctcaactgccggaaacgtactccactcgcctgtatctcatccaaagatttacgcacccctttcgccatcggattacgtgcccagttcgagtaggatctttgatggcgtatctcatagaaaggatctccccgccaagtgtttttatcaatctttatcttcttctgatagatagggtcccagttataacgggtattcgctttatatggcatcaaactcaacaccactttcggtttaggcaatgcttcaggaagcgattcatcaggcatcatccagcttttctcctccgacattcggggagtaccaaccgcagttccgaaatcaatcgactttacagcatccatattcaaatgcaactcctggtcactctccagcaatttcttcaaatgcaaagagtcttgcgccgtccatacttgcgaatatgcaaataaagccgtcaggcacagtaccatcgttgcaataaaccgtttcaatctatccatcctctatcctctttcattacctgttattttggagcacttcatatacactaatgcacatacgtttctcccttacgttaccacctatattctcctacgagaagcggtcttttgagcgtagtaatcccctgtcagcagcataagactactgatacaaacaaacgttcccacatgaatgtttcctattttttgctttccgaaggctcctcctttgttaccaccaacgataacccgatccacaaagcggctcatcgtagcacggatcgatcgtccatcttgttttcggatattggcgttcttcccaccaactacgataacaagcggctgcatcgagcacttcctcatcagtcaagaaatagattgcttcataattttcagcattcgccaataccattttgcaacctaatgacggaggtgtgccctgacggatagactcaatcacccaaagcatacactcgcccaaccgaattttaccgttgttcatattataaaccgacggaaaagaaggaataatggtcagatcttctgcatattttaaaagttcggggatgtcctcttccgtaaaatgagggacctccaccacccctttatcattcttcatcttgtacgtacccgacttcaattgtttcacaaaaagggcaacatccggattgttataatccatttcttcgctggtgcatcctgtaaaagatacgatcaggcaaacagccatccacagcattagtagtgtttttttcattttcataaggattaatacgtcatgcgaagtccgcaaagtaaattaaaattagtcggccgtttcgttcgtaccgtagccagtttcgaatctgttttgaaatgatgcgaaactccgggttcggcaaaaacagcaagtcggtcattaatcttataattgattccaatgccggcagtcactgccagttggataggttcttctttaaaactgttgtccggcgcgccggcgatacatttatcggctattccgcctacggtagcgtaaagatcaaatttcttcgtatctaccagtgttacatttactttaacggggatacccagatagtgcaaatgctgccccgccgaacgaaggtttgaataaagcagtccggtttctattccgagagattcgtttagtttacgctctaccgttacccctgcggaaaccggcattttataagtgccattatcagccggaagcgccgtgcctacctgaactttcatcgcccagcgatgctttttcaccgctttgggttgagccacattcacattcgattgttcttccggagcaacagatgattccgtatcaccgtttgttgcctgccaaaagccgttattcccttgattaccatatcggttgccatttcccgtagaagtagtggcagaaaaagaaaacgacatagagaaagtgatagaaagcgaatcttcctcctctgtgtattgtgacagcataccgtaagactttggagccggtttcggcaacaccggttctaccggcaacggtaactgattgacgcgtattccatctccatccatctgtcctccatttgtcacggctatctttgtaaatgcttcttccatttcttctttgggagagaaatacaagaaagtagccgacgaggccgccaaaacgagcaatacagatgccgcagccgccacacggaagagcagaatccgacgacgatgctggcaagccacaggtatttcctgcgagagctcttcccaaaagccatcccgtacactcatccctgcatcagcgagacgcgtgcgaaacagatcggttatttcatcattttctttcttcatgattcctatactctttaattctttttgctaacaaatacttggcccggtgcaactgcgaagtagacgaatgttctttaatgtgaagcatcttggctatctccttgtgcgatttctcttcaaacacataaaggttgaaaacggttcggcaaccatccggcaattcggcaataaaagccatcaattgctcttcggagattccagcccctcctcccgagtccgatatatccggtatatcgggaagctgctcttcatgcactaccaactggctgactcgtttctcccgccgcaggaaatcgagtgattgagtaaccatcacccgggttatccatgtacagagcgaagactcgccccggaacgagaagttggtaaaaatcttgatgaaaccgtcatgcagtacatcgtgcgccgcatccatatcgcccgtatagcggaaacataccgccagcatctgtttggaatagagggtgtaaagttcctttcgggctgaatcctttcctgcccgacagccctttatcagttctatctcgttttccaaagtcaattacttttttttaaaatcgaacgtatgtctgcgtcgttttactcattagacgcaagagtttgaggaatgctgcaaggaatattgctaaaagaagttaaagaatagaagagagttcaccacagaggacgcagagtacacaaaggaacaatgataggaaattcttcctataaagtaagtttaaaacctctgtgtactctgcgtcctctgtggtgaaaaaaatcagcacgctttgaaactcatatccagtcctttcactgaatgagtcaaagcccctaccgagatgaagtctacgccacattcggcatagtcacggagggtatcaaaagtaatgccgcccgaagattcggtttcgtatttgcctgctaccatctccactgctttcttagtcatctcgggagtgaagttatcaaacatgatacgatccactccgccgaggtcaagaacttgttgcagttcgtcgaagctgcggacttctatttctattttcaggtctttgcctttttccttgcaatattctttggcgcgagtgatggctttgtcaatacctccggcaaagtctacgtggttgtctttcagaagaatcatgtcgaacaaaccaatacgatggtttactccaccaccgattttcactgccattttttcgaggatgcgcataccgggagttgtcttacgggtgtcgagcacacgggtatttgttccttccaatacctttgcgtatttgcgggtcatggttgcgatgccgctcatacgctgcatcacgttcaacatcaggcgttcggtctgaagcaaagattgcacttttccttccactaccattgctacgtcgcccggtttcacttctgttccgtcgttgataaacacttccactttcatagtggggtcgaagcgattgaagatttctttggcaacttcgatacctgccagtacaccggcttctttgataagcaattttgattttcccattgccgtagcgggaatacatgaaagggtggtatgatcgccatcacctatatcttctgcaaaagcaagatcgatcaacttgtcgatcagttctttttccttattcattgatcttgtcaattcttatttgatgtattaaatattgattctgcactttcttcaggaagcagttcacacgaaagttcccattagtagtagccaacgtgccgataacgaaacttgattcgtcccgttttccctgatggttcacattaaatccgctgactttattcttcgtaaagaattcctgcatcatagctgttgctttctgtttgtcaacgtttgtcgagcgaccttggagcaccaggtttaccttgtcccccatatacttacttagctcttgcgagcttcctcttttaaatgccgtaatcactcctgccggtatctcttgcgccattagcaacgagagggaaagaagcaatgcggtcattcctacgagcactcgttttttcataattacaagcttttaagttgaagtttaaaggcttaaactttcaactaatgataggcaaaggtaagcattaattgcagaataacataaaaaatgcctatttttgtgcaataatcagaattatagacgtatgaaaacaaccctgctcgtcgtaggacgaaccgtagaacaacactatatcactgccatcaacgactatatccagcgcaccaaacgctatatcacttttgatatggaagtgattcctgaactgaaaaacacgaagagtctttcaatggaagtacagaaagaaaaggaaggagaactgatactgaaagctcttcaaccgggtgacgtcgtggtgctgctcgatgaacacggaaaagaaatgcgctctcttgagtttgccgaatatatgaaacggaaaatgaatacggtgaataaacgactcgtttttattatcggaggcccttatggcttttcagaaaaagtgtatcaggcagcacacgaaaagatttcaatgtcgaagatgactttttctcatcaaatgattcggttgatattcgtggagcagatttatcgggcaatgacgatattgaatggagggccgtatcatcatgaatagtaacttatctcatatactattataaacgagacaaaatagactttttaatttcgtcccaagatacatccacaaacatataaggcattggttcctcctccgcatcttcaaaataagctaaacttttcatagccataaaagaagatgagtcaggatatttttgagaatagaaatccaatagatttttcaatgaatactttttcaacaaaaagtaaatatctacaaaatcttttttagtacctctcccttcaatagcagtaattttcattgccgcaatatctctaggacttgccaaacgtatcccatctttatatacgacatcatcaagccaaggataagtatagttcacgatatctattttaacctcattcaatacgtaaatgtgtatattcttagaatcatttaagatagtcagtgtcccaagtgttcgcaaagcttccttcaaatcttgagaatctacattaatctgaccaaaaaaatccaaatcgaccgactttcgatgtcctaattgcaaagctaatgcagtaccaccgactagacgagtattacaaagtacaggcaactgttgcaacttttttaaaagttccagtgttgtggattcgaccgttgataagtgtaacatctaaattgttctttaggagtttgtgaaatggcagaaagataagctaaagcccgaggctccaattcacgaaaccctttagctatttcgacgatcctcccaagtccataatattgttttacaatattccaatcttgcaacataccatattcaagcactctctttattatatattgtgaatgcttctccatatccaaatcatctttattgacatcccaaaaaagatatgttgaaaatcgagtaatatattcttccattgtctatcgtattgcaatccttaatatgacaaagataaaaataaaaaatgaatcgaacgcaagctaatagctatatttcacaaaactgtattattctcttcttcatagattttattaaaaactctacaaagttttttttcatccgcaattagttgacgaagttctgccaaccgtccggcattatccgattggggtatccataacgtcagataccctccttctgcatatttttcagttagatgtttccgaaaacgggcatattgctcttctttatccatctccggataatgagacagcccatattgtacggtacggcgtaaagtaacttcgggatcaataattcggtcagcctcggcaacaatcattccatagattgttctgggagcctgtttattagaagcccgatgatcttctatcgcctctttcatctgcaacagctgttcatccgtaaaccaacgccgcaaagtttcgtcggctaacaatactttgccggaggttatatgatgaaattcacgtccttcatacaaccccaggtcatgataagcagcaatgacataaaccatcgaataatcgacttcataatacgtcgctaatttcagactttcctcaattaccttttctacatggtcaatttgatgcgctttatcaaagttagcgtattgaggaataatactttgccgaacatagttttgcaattcagcaggcacataatgagtcatattcgatctttttagctagtaaattcttttatttatattattcccgattcatcaaacgatgttctgccatctgttcgaactttgttcccggacgaccataattggcatacggataaatggaaataccaccacgaggagtaaatattcccgttacttctatgtatttgggattcatcaatcggataagatctttcattatgatgttcacacaatcttcatgaaaagcaccatgactacggaaactgaaaagatacaatttcaaacttttgctttctaccatttttatatcaggaatatagctgatacgtatttcagcaaaatccggttgccccgtgataggacacagacttgtaaattccgggcagttaaaacgtacccaatagtcattttcaggatgcttattatcaaaagcttccaatacttcaggagcataatcttgcttatactcggtctttcttcctaataaagaaagttggtcttttaattctgtcattgtactcgttaactacaacccctattctagataaaaaaacacatttcctctttcacctatcaccagccagtctcaaacgctctattcatcgatgtttcagtggtgaaagattcgttttacaacctatcaccgcatctatcacctatcaccatcaactcttaacccacggttgctttatccgcagcttacttgttacagtttgtttcattacctgaaacaaagagtttcccgtagagaaacaaagtgtttcacaccgaggaaccaagtgtttcacgccttggaactaatagtttcaagtaacaaaaactttagtttcccaccgttgaaactctagtttcccaccgttgaaactctagtttcccaccgttgaaactctagtttcctaccgttggaactttagtttcaagctgctgaaactaaactaagccaatacattccaggcagaaactactatcttctattagttgaaacttaccggtgacaatagatgtgacggcaaaatatcaagttttgttgctgtcaccacttgctgtcacaaactatttattttataatcaactgtttaacaacaacaatgtgacagatgacagcaagaaaatgcattttaatctctatgtagagatattattgattcttactttttaaatacttctccaatccttcccggcgtaacgtacaagccgggcaatgtccgcagccatctccttgaacaccattatagcatgtcaaagtctcggtgcgaatcagttccattactcccaattcgtcggccaacgcccatgtctctgctttatcaatccacatcaaaggagtatgaattacaaactgttcatccatagccaaattgagagtcacattgagagacttgataaacgcatccctacaatcgggataaccgctgaaatccgtttgggaaactcccgttaccaaatgattaataccacgttcacgggcatacaccgccgcaatactcaaaaagaacaggttgcgtcccggaacaaatgtattgggaacactatctgccggcttttcctgatccatcaccatggtggtatcggtcaatgaattatggcctaactgtccgataaaggaaacatccatcacatcaaattccacttccgctttccgggctatctcccgtgcaagttccacttctttctgatgcttctgaccatacagaaaactcaaggcatatactttcttaaaattgcgttttgcccaaaacaggcaagtggtagaatcctgcccaccactgaacacaaccaatgctacttctctattcatattctatatcaaatatctttgactttcaatacattataagagatattggtgtcgtaaacatcactaccgtctattttcttgattgctttcaccacacggatcgttaccgggaggatcatcacctcatacaaggatttcaatacaatctgaatccccatcatgataagcagttctttccaggcaatgacacctccaaaagctaccgggaagaaaatcaatgaatcggcagtctcacccaccacagtagaccaaatggcacggactgaaaagttacgtccctgactggctactttcattttactcatcacatacgcattgagaaacgagcctaccaaaaaggccatcagactggcagccacaatacgtggagccataccgaacacaaaatcaaagtgctcttcaccttcccaaaaaggagcagcaggaatggcaacagctatcaacccaagagcgaccacaaagaagttcatagcaaaaccactccaaatgataaggcgcgctttcttgaatccccaaacctcggcgatacagtcatttataatataagaaataggaaaaaccaataatccggctgtcacggtcaaactaccgatctggattactttcgtttcaagaagattggctgcaataaggcaaacgttaaaaaggatacccagcagcataaagggtacagatactttttctttcataattcctgttttttacgtggtgttctagaatacacgaccgctattcacggcatcaaatgtctttttattcttttgcgctgcaaaggtataggaaaaactatgaaaaagcaaaagaaatccgatgattgacatacatttcaccgaaaagacataactttgccaaatacagagcttaatgtttgtatcaaagattaaacttataaactatatttaaagaaacgatatctaaatcatggcaaaagaaaataaaagcaatatcatcatctaccaaagcgaagacgggcagacacacatagaagtgcagatggacgaagataccgtatggctatcccaacagcaaatggccgacctttaccagacatctcgaacaaatgtggtagaacatattaagcacatttatgaagatggtgaacttgttgaagaatcaacctgtcggaaaatccgacaggttcgacaagaaggagcgcgcatggttgaaagagaaattcctcactacaatcttgatatgataatatctttaggctaccgaataaattcaattcaagccacacacttccgtcaatgggcaacggcacgccttaaagaatatatcatcaaaggcttcaccatagacgatgaacgattgaagcagctgggaggaggctattattggaaagagttactcgaccgcatccgtgacatccgatcgtctgaaaaggtgatgtatagacaagtgcttgatatctatgctactgccgtagattacgatccccacgccaaacaatctattgaattcttcaagattgttcagaataagctacactttgcagcccacggacatacagctgcagaagttatttatgaacgagccgatgccgaccaacacatgatgggactaacttcctttaaaggcgaccatccgacattgcgcgatgcaaagatagccaagaactacttgagcgcagaagaactcaaagtgctgaacaaccttgtctccggatattttgattttgccgaagtacaagctatcaagcaccgtccaatgtacatgaacgattacatcaaacatctggatgccatactgtcttccacgggagaagttctattgatggatgccggtatgataagtcatgaacaagctatggataaagctgaaacagaatatcgcaagtgggaagtacgcacgctttcacctgtagaacaagcctacctcaacagtatcaaaacactgaatcataaaactaaaaagaaaggatgactaaaaaaaatgaaaactctctatgaacaatccttttcagacgactacagtgaaagaaaaagctatagaagcagcccataccgcacaagcaactgtccaaaaggctaaacacagagtacagaaaatactggattgacaataaaaaagagcctccccatcagcgtcgtattctgacaggaaggcttatcactttgaccttaaaacacatcactcaattaaaaaagcgcatcaggaggagaaatctttcaattcctctttcaaccgtttacggatgaaaaacagacggctcttcaccgttcccatcggcaatcctaatttctcggcaatttctctatacttaaatccagctacaaacatctgaaaaggcactttcatctcttccggtatggaatgtatcaccctatacaactgtttcatatcgtatgtaaattcgaatctgtcagcatcctcatcttctatcagatgttgttgattgatggagtaactatcatcaatcaagttcatttcgcgaactgtacgacgatagttattcacgaaaatattacgcataagcgtatacatccatcctttcagatttttgctatacgtaaacttctcctgattatccaatgcctgcaacaaacaatcctgaaccaaatcattggcagattcgcgatctgccgtcaatttatatgcgaagcgatgcaaatccggttgtatcgctaatattccgttcgtaaaatctactttttccatcatcgtatttcttttctctaattagtacgatacaaagatccgcttttttagaatcattataaatagcaattcttccgattagtttggcaatttttcctttgcccctctcaaccatttctttttttagttgttgattgggcattcacctaaaacttaactcataatgaaaacaagctttaaaatggtagctatgctactggggataggaattttccccctctgtgcccatgcacaaaaaaaggtaatcatcgaagatgaagaacccaactcaatcatgtttgtctcgaagaacaaagcaggagatgaaatcatccgaatcatgaacgaccgttcacagatgcgttttcacgaccccaatgctccccgcttcctgctcactgaccagaaagggaaattcgccctcggtatcggaggatacgttcgtgcaacggcagagtatgattttaacggtatcgttaatgatgtagatttctatccggcattgataccacaacgcggaagcggcaattttgcaaagaaccaattccagatggacatcaccacttcgaccctgttcctcaaattggtaggacgtaccaaacatttgggagacttcgtagtttacactgccggaaacttccgtggcgatggaaagaccttcgaattacaaaacgcttacgcacaattcctcggtttcactatcgggtacagctatggttcgttcatggacctctccgcactgcctccaactatcgactttgcagggcctaacggttcagccttttaccgcactacgcaattaagctatatgtgtgataagttgaaaaactggaagtttggtgtttctatggaaatgccttcagtagacggaacaaccaataatgatttgtctatcaacacccaacggatgcctgactttgccacttccgtacagtacaactggaacagcaacagccatattaaattaggagccattatccgcagcatgacttattcgagcaatgtacatgaaaaagcctattctgctaccggcttcggtctgcaagcctctacaaccttcaatattaccaagaaattgcaggcatacggacagtttaattatggaaaaggtatcggttcctacctgaatgatttaagcaacctgaacgtagatatcgtccccgatcctgacaaggaaggaaaaatgcaagttcttccgatgctgggatggtatgcaggattgcaatacaatctttgcccgagtatctttatatccggaacatacagtctgtccagactttattctgaaaatggatatcctagtgagaatcccgaatcctatcgtaaaggacaatatctggtagccaatgctttctggaatgtaagcagcaatctgcaagtcggcgttgaatatttgagaggatggcgcactgatttcagttccgcaacccgtcatgccaaccggttgaatatgctggtgcagtattctttctaaactgacataataataaaacaaaaaagccgtctcaacaccatgttcgagacggcttttctatatataaaggattagaaatttagaacttatagttcacgctcacaccaaacactttattagtacggctgtaaacgtctttatccactaatgatgccatcgatgttgcctctaaaccacgtggtttttctttagtgtaatcactatatgtagtccagaaataagctacatcaaggctcaatgcctgagtaaaattgatacgacctccaaaacctacagaataagagtcacaagaaaaacttgtatctgattggaaagcgtcgctcaaaccgtagtctgttttctgataacctccactaacagtgaataatttgttaatatcccactcaacaccagccaaatactcgtgtgtaccatgtttcaatgttttctgtttgccatctgccataccagcattcttatcatcaaagaagtgatattctactgaagcccg

SEQ ID NO: 8268 - DNA, 1882 bp, Unknown
  gut microbiota DNA sequence
gtcgaaatgaaaaaggaggttgtgtcaaaacgctgacacagcctttttttatgcgcaaagcccagactttctcaagcccgggctttgttattacccaaagttttcgtatctttaggcataaagtttttcgttatggcaaagttacattttcgtccttacattcccaaccaaaccgttctttttccacaaagaattgatgaaaacatagctgcgaccgacccggtccgcatcgtgaatgctgttattgataacctcaatcttgagagtttcaagaagctttataaggaaacgggccgttgtccttatcatcctaaaatgatgcttaaggtgataatctacgcctacatgaataatatctattcttgccgtaaaatagagaagcacctccttcgtgacattcattatatttggcttgccggtaatgagcatccggattttatcacgatcaaccgttttcgtaaccgtgtaaaggaggaaataaataatgtatttacccagttggttcttgtccttgccgataaaggcttcatcagccttgatgtggagtatatcgacggtactaagattgaatccaaagccaacaaatatacttttgtctggcgcaagacagtcgaacggaaccgtacgagactaatggataaaatccgtattctcttggagcaggtggatgaaaccattgcacaggagaactctataaaagacacatccgtggagtttacttcctgcaagctctctgacatagtggatgaacttaaagaagccctggaacgccagcctgcaacaaaggataaggaagaaaagaaagctctgcgcaaaaagaagaagcaggtcagggaacttgaagggtatcgtgacaagctgatagaatatgacaatcaccttgatacccttggagaacgtaactcctattccaagaccgatcctggtgccacattcatgcgcatgaaagaagatgccatgaagaacgggcagaccaaacccggatataatctgcaaataggtactgaaaaccaatttatcacagacttctgtctgtttcccaaccctaccgatacactgaccctcataccttttttccactctttccagtaccgctataaccgtttaccgaatatctgcgtggcagactccggttacggttcggaagaaaattaccggttcatgcaggagaatgggatagaagccttcatcaagtacaattacttccataaagaacagcgtccccgttatactcccaacccgttccatgccgaaagtctccattacaatgagggggaggattattacgtttgtcctatgggacagcacatgaaccgtataggaaccaaacgtgacaagacagcgagcggatacatcaccgaaagtgcccggtataaagcaaaaagatgtgaaggttgccctttacgtggcagttgttttaaagctcgggggaaccgtattatagaagtcaaccaccggttaaatcaatacaaacggcaggcacgggaaagattgctctcagaagaaggtatcaagcatagaggcaggaggtgtatagaaccagaagctgtgtttggacaaatgaaatacaacatggcatacagaagattccggcatgtgggagaagacaaggttacaatggactttgctttctttgctatagcctttaatatcaaaaaaatgtgtgctaaactgataaaagaaggaaaggggctcattacagttgccaaatatatgtttatgggactatttataacccgatataattggaatatagcaacttgttgccaaatgcatgaggaaaaagtagcatagccaaaagaaaatatagcagaacttaaaatataaatgaggttgtgccaacgttttgacacaacctcatttttataatcaaattaacctt

SEQ ID NO: 8269 - DNA, 5283 bp, Unknown
  gut microbiota DNA sequence
tattcgaaagtcgcctccggtgaaatatgttgtttgaagtattctacgatttcttgaaattcgtccagtgacttggttgtctgtgagaaaaggcggatacttttatttaaatccagctttttggcttcctctgccttttcaatcacaattgcttttccgtctgtctgccctaccagtcccagcacttctgcgtgtccgctcttgccgtagatgacaatttgtttttcttcgtcactgtctgccagatacccttgtcggatgcgtttctgcaaacgtaatacaaccggacaggtcgcatcgataatctcgatcttattttcacgggcaatcatataagtttccggtggctctccatgcgcccggagcaatacttttgcatttttcaattgcttgaattcttcccgattgatagtgattaatcccatcgttttcagcctgtccacttcccggctattatgcacaatgtctccgaggcaatagagtgtttctccctttgccaactcttcttctgccttatgaatggctgtcaccacaccaaagcagaagccggaaccttcgtctatctctaccttgatcataaaacaaactatttacttaccttattaaattgttcgaaaagccattttttctgctcttcaatcgataagtcggtattatccaggagcagcgcatcttctgctttgcgcaacggacttacttcacggttttgatcgatataatcccgttgtttcacattttccagaatctcgtcgaagctggctgcctgtccctttgctttcagctcgtcataacggcgttgagcacggatttcgggagtggcggttacaaatattttcagttccgcatccgggaaaacagtggtacctatgtcccggccatccatgacaatccccttctcatttcccattgcttgttgttgagctaccattgcttcacgtacgaagtcgagcgtactgataggactcactttggaagaaacctccatcgaacggattttattctctacattcacaccgttgagataagtgtcgggacgtccggtttccttattcagccggaacgatatatgaatgtccttaatttcttttttcagcctctccgtatcgataacgtctccgtcgaaaattccgttttctatactatataaagtgaccgcacgatacatggctccgctgtcaatgtaaatgtagcccacttcacgggccagatctttagccattgtgctttttccgcaagaggaaaaaccatcgattgcaattgttatctttttcatattcagttcatctgatttgtccgccaaagatacggtaaatttgaaaatcaaccataagtttgccgttaaaaggagcaagacaagtacgaaagaattaaaaaagttaaaaagccggataaaaagaggcaaagaggggaacgaatacatgaaaatgtactatatttgcccggagacacatgaaaggacacttttttttaatcattatattaataaatttatggaagttaaaaaatcacccaaagcagacctggaaggcaagaagtctacatggttgctcgttggttacgtggtagttctagctttcatgttcgtggcgttcgaatggacccagcgtgacgtgaagattgatacaagccaggcagtagctgatgtcgtgtttgaagaggaaattattcctattaccgaaacccctgaacaagcggctccaccaccacctgaagctccaaaagtagcagaattgctggagattgtggatgataaagctgatattgaggaaacaacaactattatcaatgaagataaccaagctcgtgtagaagtaaaatatgtgcctgtacaagttgttgaagaagaaccggaagaacagactattttcgaggttgtagaaaacatgccggacttcccgggcggacaagcagctttgatgcagtatctggcaaagaatattaaatatccgactatcgcacaggaaaacggaactcaaggacgtgttatcgtacagttcgttgttaacaaagacggtagtatcgtagatgcgaaggttgtacgtagcgttgacccgtatctggataaagaagccctccgtgtgattaataccatgccgaagtggaaaccaggtatgcagcgcggaaaaccggtacgtgttaaatttacggttcctgtgatgtttagattgcagtaatttgtaataatataaattaggaggctgctttcggcagcctctttttattcattaatttttttattcatcatgtttacagcttctcaattacttgataagataaataatcatatttctgaaattcagtttacccggacgccgaaaggactttatgaaccgattgaatatatcctttctctgggtgggaagcggatacgtcctgtgttaatgttgatgggatataacttgtatcgggaggatgtagcgtctatatacgatccagccactgcaattgaagtttaccacaaccacaccttgttgcatgatgatttgatggatcgttcggatgtgcgcagaggcaaacctactgtacacaaagtatggaacgataacactgctgttctttcgggagatgctatgttgattctggcatttcgctatatgacgggatgtccgcaggaacatctgaaagaagtgatggatttattcagtctgactacacttgagatctgtgaagggcagcaactggatatggaatttgagtcccgctgtgatgtgacagaagacgaatacattgaaatgattcgtttgaaaacggcagtgttgcttgctgctagtcttaaaatcggtgcaattttggcaggagcgactgctgaagattcagagaatctttatcattttgggatgcatatcggagttgcgttccaattgcaggatgatttgttggatgtatacggtgatccggaagtgttcgggaagaagataggcggagacattctttgcaataaaaaaacatatatgcttatcaaagcactgaaccgtgcagatgaaaagcagcaggaagaattgaatcgttggttgaatgcagaaacttttcaaccagcagaaaaaatagaagcggtaactgaaatctataatcagttgaatatccgtaatgtctgcgaaaacaaaatgcgcgaatattacacccttgctatggaaagtctggctgcagtcgccgttgcagaagacaggaaaaaagaattgaagaatcttgtgaaattattaatgtatcgtgaaatgtagctaagtgtcagagatatgccttacagacgattaccaaatacagatcaagcaagagttcgggcgttgaaagcggcagtcgaaaagggggagatgtataacgtacgtgacttggctattacattaaagacattatttgaggcacgtaatttcttacatcggttcgaggctgcgcaaatttattatacacagtgttacaacaaccagtcgcgtgccagccgtaagcatcagatgaacgtgaagaccgcccggttgtatatctctcattttatccaggtactcaatttggcagtacttcgcgatgaaatcaaagtggcgcataaagaattatatggcctgcctgcttcaaacacagtgccggacctgttgagtgaagccgcactggtagagtgggggaagaaaataattgaaggcgaacaacaaagaacaactcaaggcggcatacctatttataatccgactattgcacgtgtaaaagtgcattatgatatttttctggaaagctacgaacggcagaaaaactatcaggcattaaccagtcgcagtcttgatgaattggcatccatgcgtgggcgtgcagatgaattgattctggatatctggaaccaggtagaagctaaatatcaggatgtcactcccaatgataccagattagaaaaatgtcgcgactacggactgatatattattatcgttccagcgagaaagtaaaagaagaaaaagaaatatcatgctgatagatactcattctcacctttttgttgaagaatttaccgaagacctgccgcaggtgatggaacgtgcacggaaagcgggagtttcctatattttcatgcccaacatagacagtaccaccattgatgctatgttgtcagtgtgtagggattatccgggtttttgctatccgatgatcgggctgcacccgacttccgtcaatgaatcctatgaacaggaattagcagttgtacgcaagtacttgtcgacttctaatgaatttgtggctatcggagaaataggcctcgacctttattgggacaagacttttctgaaagaacaaattttggcttttgaaaagcaaatagagtgggcattagagtatgaccttccgattgtaattcattcaagagaagcatttgaatatatatataaggtaatggagccctataaaaagacgccattgaccggcatttttcatagtttcaccgggacatcggaagaagcggcgaaattgttggaattcgaaggatttatgttaggtattaacggagtcgttacttttaagaaatcgactttaccggaaacactgacgacagttcctttggaacgcattgtgctcgaaaccgactccccttatttagctcctgtgccgaaccgggggaagagaaatgagagcgccaatgtaaaagacacacttatgaaggtggcggagatttatcagataactccagagcacgtagcagaggtcacttctgttaatgcgctaaaagtgtttggaatccgcaaataaggttcgaaaggttttaaattatattaatttgcagtatttattcaagataaaagagggagaatgcttcaagaaaagaaaaaaaagaatacatttgtagctgaaaatgcagaaaacatgcagggagagatgctcgagtggttgaagaggcacgcctggaaagcgtgtatacgccaaaagtgtatccggggttcgaatccccgtctctccgcagacatgaaaaagagaagagaagtaaatacaataataataatcaattaattaatcttaaaaattagacacacaatgaaaaagttatttgcaattgttgctgtgattggggccttcacttttggctcaattcaacttgctcaggctcaagatgctcctgcagcagaacaaactgaacaacaagctgctcctgccgctgaagctactactgctgctgctcctgctgcagaagaaggtggtattcacaaggaaatcaaagttaaattcatcgaaggtactgcatctttcatgagtttggtagctatcgctttggtgatcggtttggctttctgtatcgaacgtatcatttatttgag

SEQ ID NO: 8270 - DNA, 5173 bp, Unknown
  gut microbiota DNA sequence
acaattctcatacgtacacagcccgcaagtatattccagcttacggacatgagaacccactccaataataccacttacagatttgatgggaatcattaggctggaatctgtcaactgaataccacagggcgaagcgaccggaaataaggagaatagtttttgttgttccgatacgtgccatccgcaataaccggggctgtatctgttagtgtgcttccaacctctcttttcgataaatgcagccaactcctcttccatgcaatcagcagccttttctgcaatgatgctccccaatgagtctgctatatatactttcaccatgtcgtcctcttgctggaggagatgttggaactcctcaaattcaactccggcagttgcggtaaaaaaggcaaaagcttccgaaccccgtaattggcgggcaatggttttaccgattgagagaaccgtatcttttacagtcagtgttgctttttcagtgtcaagcagtccgtcagtgaggaaaaataaaaaacggggacgaagaaggggagtgatacagtcaagtaacgtatttatttcttctatgaccattccatccggcatagaatctttatatcccatcgcctcgtatatatcggacgatgggatttgcagtttctggtaagtaagttcctgttcaaccattattgaactcttccaatgcggtataaaatgcgtctatattaatagaagacgtatgtggcggaatatcacaaccacttgacaatacgaaattcggatatgcacgggtagcctccaatagttgcaaagtcgcttccttcatagtctccgggcctgccatcttgaaaaggctcaccgggtccagatttcccattgccagtgcatcggccggaacctctttcaacgcttcctccatcttgattttattcccgaagtggtaagcggctgcaccggtataaaccatcgcttgtgtgcaattccctgtgtttccgcaattatgaagtactacggcaaaatgattatcctgtaccttctctattatttccttcacgaataaagaagaatattgcaggcaatcttcgttggataacagtcctgcagcaggttcagccatgactacaccgttcacaccggttgctttcaatgccatgcaatagcgggtgatgaagtcactgcattttcttaataacgtattggctgcatcgggattaatataaatcagcatcatgatttccgacatatcatacaaacgtccggccagcgaataaggaccgatgcaaccggcaaaaaccggacggtctgtaacatttctggctgtcagcatatttgctttaagatattccgggattcttcctttattcaacgccggaacttccagcttttcaatagcagcttcatccgccagtaaacggccggacacactgggcacctcattttccggaaagataatctctgccccgaaagcttccgcttctaccgtcagatccatgataacggttgctgccgcagccggatacttgtcacaaagagccttgatagcctcataatgaacctgtccgtttgttaccgcatcatgcaccgttttcccgataaattcaatacccggatgtgtcatgatcggaattgcaatcgtttccttaccttggatcgtttggctgatccattctttcatattcagtttacccataatttcagtttttaatatcgtcttgtaataaagacgaagttgcccttcttttgtaatctcgtatatgataaaatcttataccggtataaaaataaagctgtccttcaaaaagaagaacagctttacacctatttgatttatcttcaagctttattttaccggaatcttatcaatacggttctgatgacggccgccgtcaaatttggtagagaagaactctgtcaaaatcatgtccgcttcttcagtgctgatgaagcgtcctggcataaccaatacattagcgtcattgtgctgacgagccaggtgtgcgatttctgcattccagcagagagcggcacgaaccccttggtgcttgttcagcgtcatattgattccgtttccactgccgcagatagcgataccgggataacattctcccgattccactgcaagagccagcggatgagcataatccggatagtctacgcttgcggtagagttagttccgaaatccttgtaagcccagccttttgcttccagccagccgcgaacatattctttcagttcaaaaccggcatggtcgcatgctaatccgattgttttcattagagcattgcttttacttggttatatacgttctcggcagtaaatccaagtttctcatccaatactttataaggagcggagaaaccgaaagattccaatccccaaactttaccgtggcaacctaccagaccttgaagagtgacaggcaggccggcagtcataccgaaaatcttcgcatctgccggaaggatagcttcctgatattctttcggttggttgcggaacagaccttcagacggagcagatacaatgcgtaccttcacgccatctttgcgaagcaactctgtgccggctaccaatgtagacacttcagaacctgaagctaccaagataacatccggattttcgtcggaacctgctacgatataagcacccttggctgcttgttcgtaatctgttcctgccggtaaattggcaatattttgacgagagaagatcaatcctgtcggagtagacatattttccatagcaagtttccaagcaatggttgtctcttctgcatcagccggacgaagtaccaacatagagttgtgtcccttatggtttttcagtttttccatcaggcggatttgagcttcctgttctaccggttcgtgagtaggaccgtcttcacctacgcgaaatgcgtcgtgtgtccagatgaatttcactggttgttccatcaaagcagccatacgtacggcaggtttcatgtaatcggagaatacgaagaatgtaccgcaagcagcgatcacaccaccgtggagagacataccgatacagatacaagccattgacagttcagatacacctgcctggaagaatgctccgctgaaatcacctttcttgaaagaatgagtctttttcaggaaaccgtcagtcttgtcagagttagaaaggtcggccgaagcaacgatcatgttttctacctgtgtagcaagtgcgcccaatacggttgcagatgcagcacgagtagcgctacctgctttctgttcgatagcagcccagtccactttcggagctttgcccgagaagaagagttccagttttgctgccagttccgggtttgctttcgcccatacagctttctttgcatacttttcagcaacgatcttcttcagctcttctgcacgttttgcatacagttcggctacttccgggaatataacgaacgggttagtaggatcaccacccagattcttgattgtatttacataagcgtcgccaccgagaggagcaccgtgtgtagcgcagttagcttcatagctgctgccgtctgccttgcgtgcacctttacccattacggttttaccgataattagtgtcggacgttctttttcagcctgtgcttctttgattgccgcacggatttcgtcaggatcattaccgttgatactaagtacgttccatccccatgcttcatatttcatggcagtgtcttcaacggttacgtctttcgtttctgtagaaagctgaatatcgttggagtcatagaacataatcaggttgtccaatcccaatgcaccggcaatacgtccagaaccttgagagatttcttcctgaataccaccgtcagagatgtaagcgtaaatggtctgattcatcacctcgtcgaaacgggctttcaagaatttggcagcgatagcagcacctactgcaaaagtgtgtccttgtcccagcggaccggaagtattttcgatgccacgcatgatgtccacttcagggtgtcccggagtagggcttccccattgacggaattctttcagctcgtccagcgtgaattttcctgtcaatgccaacgtagaataaagcatcggagacatgtggcccgggtcgaggaagaagcggtcacgtccttcccaacggggattttcaggatcgtatactagaaactcagagaagagtacatttacaaaatcagcaccacccatggcgccacccgggtgaccggaattggctttctcaaccattgaagcagcaagaatacggatgttatccgctgcacgattcataagtttgttatcgttcatatcattaaaatttaattgatttctgtcagattgttcgcaaagataactctttatgtggatttaacaatccaaaagagctatcttttttatcgacaattttacggtcttcttgtttgtgatacaataagtaattactctaaaattactgtaactctaaagtaacaatggacttagcaggaagttttaccttcattgtacctttattgatttttacctctttgaaaggtgccggttttacaatattaggtttttcaaaagaattgtaatcggtcagtttggcagcggtcagaatctctccgatagctttcttggctttcgtatcacccagattgatggtgatttcctgcgcttcatcagcatctacattggaaagagaaatatggatcaccccatctttatttttggaagctgtggcgctcaccatcggtacagtgcgattatcacgtacacttatcttttcgcaggtcaggtcgataggaagataagtggcatcctggtgtactttatacatcttgaagacataataagtaggcgtcaacaccatttctttgtctttcgtcagaatcatcgattgaagtacgttgacaatctgtgcgatatttgccatcttcaagcggtcggtgtatttatggaatacatcaagacttaaagaagccacgaaagcatcacgcaacgtgttctgctgatacagatgtcctttgatggttccgggttcctcatcccaccaggttccccattcgtccagtaagagagcgattttcttgtccttgtcatatttatccatgatggcacaatgtttcttgagcacatcttccacttccagacatttgcccatcgtccagtaataatcatccttgttgaattgagtggctgatcctttgctgccactccatccggttacggtataatagtg

SEQ ID NO: 8271 - DNA, 14734 bp, Unknown
  gut microbiota DNA sequence
tttgtaagctctattcttttttataaaatgaggagatttttttcctgatttagaggatttgtatcctgatttatgcaattgatgtaaaattgcattgttgggataatccaaataatttaataacaattgattggagctattaataattatctatatttgtgctatagaactcaaatctggaatattatggacgactttaataccgtatatgcactactcgttttagttatgttatttattttattgagtaggttggacaatcgcttcggaaagatagagaaagagttgaatgagataaagaaacggatggaagattatctcaaggttcagcaaaattctgttgctgaagcctccaagccgaaagaggaaatatcagaaaaagaaacaaaagatattcctgtgatgcctcaagcggcagagcatgttaaggcagtaaagaccggacaacgagaagaggctgttcaggaaaaacacgaaccggttgttgaagcagttgtccgtgagacattggaaaagacgcctgaaaagacgcttgaaacaagaatggaggaagtttgcgtagaggctgttcggaaggaatccgctgaatcttcgactgtgccagttgtaccggttactccggctactccggttgttccggttgccccgactgttccgaaacaaaagaagcaggtgaactatgaaaaattcatcggtgagaatcttttcggaaagattggtatccttatatttgtaatcggtgtaggtttctttgtaaagtatgccattgataaaaactggattaatgaaaccttccgtaccgtgcttggtttcttgacgggagctgtattgctggctgttgccgaacggttgcaaaagaaataccgaaccttcagttcgctgcttgcgggtggtgctttcgctgtgttctatcttacagttgccattgctttccattattatcatattttctcgcagactatggcctttatcattctgattggtgtcacagtgtttatgtctattctgtctgtggtatataatcggcgtgagttggctatcatttctcttgtaggaggattccttgcgccattcatagtgagtagcggggaaggaagttatttggtactgttcacttacgtgagcatattaaacttgggtatgttcggactttccatttataaaaagtggagtgaacttccaatgatttcatttgtctttacttgcctgataatgggaatctttcttttgtttaactatacctctagttctacggttatttcgaaccatctgttttggtttgctactctgttctattttatctttttacttccggtgttctctatccttcgtggagagaatatgcggacgatgagccggggattagtattcgtcattataacgaataattttatctatttgctttcaggagccttattcttgcagaatatgggattgtctttcaaagcaagcggcttgttgagcctgtttatcgctcttgttaatttaggactggttctttggttgtggaagaataggaaggaatataaattcctcgtgcataccacgttggggcttgtgctgacatttgtctccattacagttccgattcaactggacggaaactatataaccttgctttgggcatcggaaatggtattgctgttgtggctctatgttaagtcgaaaattagagtatatgagtatgcggctaaagttctggtaggactcactttcgtttcttacttgatggatgtgtatagtgtgatgtttgaacatcattccttagatacaatttttctgaatagttcatttgccacctctttgtttgtgggattagcgacaggagcatttgctttattaatggaatattatcattccttcttctctacggcacgccggttgaaatacagcttctggaatccttttatgcttatcgtctccgtaatcatactttattatacatttatgatggaattcaatttgtattttgaaggggcgacgagaagcggagctatgttcttgtttacagccatatccatttcgagtgtttgctatgctttcagaaaacgattcccgataacgaaacatctcacttcttatatcttgactatcggggcaaacgtacttgtatatattataaatatatggggcgaccagagaatatggacttcccctcctgttgtactaccatggctgacagctgtgttcgtaatagcgaatttgtattatgtagcacgtatgtactatacatcaatcggcataaaatcccgtttcaccgtatatctgaatattcttgccacgctcctttggctgacaatggtacgctctttcctttggcaagtaggagtggacgatttcagtgccgggctgtcactctcattaagcattgccgggttcgtccaaatggggttgggcatgcgcctgcatcagaaactactccgtatggtgagccttgcgactttcggattagtcctgctcaaactcgtctttgatgatttatgggctatgccgaccattggcaagattattgtatttatcattctgggattgatattgctgatactttcattcctttatcagaaattaaaggatgtgttgttcaagaatgacgaggaagaaacaaactgaatctttgaaaaatatccgataagaaaggctgcctgttctacaaaagaagggcagcctttaccttataattatgtttattcccagacgaaatcttttactcttgcgagaaacgtttcacctgctcttcgattaattccttatcatcaaaataattaatcttcatcgccttcttcacgtcagccaaagtctcggcagccgcagcccttgccacttcgcagccttgctgaagcatctcgtagatagcagggatatccttgctgaactccttgcgacgattgcgaatcggttccaaagtctcctgcatgatggaatttaggaaacgttttactttcacgtcacccaatccgccgcgttgataatgcgctttcagttctgccagattcggataatccggtaaataacgttcgaaatgttcggggaggcagaaagcatctaggtaagtaaataccgtattaccttcaatttttcccggatcttgtacgcggagatgccccgggtcggtatacatactcatgattttcttttggatttcttccggttcttccgaaaggtagatgcagtttccgagcgatttactcattttagctttaccgtcagttcccggaagacgcagacaagctgcattgtccggcaacaggatttccggttctaccaatgtctcaccatatatatagttgaaacggcgaacgatttcgcgagcctgttcgagcatcggttcctggtcttcacccacagggacagtcgttgcgcggaatgctgtaatgtctgctgcctggctgatgggataagtgaagaaacctacgggaatacttgcttcaaagttacgcatctggatttccgatttcacggtcgggttacgttgcaggcgggatacgctgacaagatccatataatagaaactaagttcgcatagttccggtatttgcgactggatgaaaatcgtagctttagtcggatcaataccacaagccagataatcaagagcaacttcgattacattctgacgcaccttttccggattgtctatattgtctgtcaatgcctgtgaatcggcaatgaagataaacatcttactataatcacctgcgttttgcaggtcaactctgcgtttcaacgaacctacatagtgaccgatatgaagtcttccggtaggacggtcgcccgtcaatatgattttttcttttcccatatttattaccttattatataatggcgacaaagataaggataaaaactgaaagaaacatcaaaatgcagttacttcatgatttgtgcctgcttaagataagaatgtaatcattaaaagccaatggaaaaacgactgtttcattaacgcggtaaattatttcagtaaaaaagtgaacatatctttttgtcatgtgcaaaatatgtcgttactttgcacaaattttgaagtcaacaatgaatcaacaggaaattagaagcaagtattatttacattcggatgttttgcacccggaaacggcaggcttcttcttttatttccaaaaacgatattttagttctttggtaatgcgttaatccttttttgagggtaacgcattttttttatgaacgaacttagaaataacaacttattataacaacaaaagaaatggaaaaggaaatcaagaaagttctcgttttgggttctggagcactcaaaatcggacaagccggagagttcgactactcaggctcacaagcactgaaagcgttgaaagaagaaggtatcagctcagtattggtaaacccgaacatcgcaaccattcagacttctgaaggtattgccgataaagtgtatttccttcccgtgaatacttatttcgtagaagaaattatcaaaaaagaacgtcccgatggtatccttttggcattcggcggacagactgcattgaactgtggtgctgaactttacacacaaggtgttcttgataagtatggagtaaaggtacttggaacttcggtagaagctatcatgtatacagaagaccgtgacctgtttgtgaagaagctggacgagatagaaatgaaaactccggtcagccaggcagtagaaaacatggaagatgccattgctgctgcacgcagaattggttatcctgtcatggtgcgttctgcttatgcactgggtggtcttggtagcggtatctgtgccaatgaagaagaattcctgaaattggcagagagctcatttgctttctccaaacaaattctggtagaagagtctttgaaaggctggaaagaaatcgaatttgaagtgatccgtgacgctaacgaccattgcttcacagtagccagcatggaaaacttcgatccgctgggtattcataccggcgaatcaattgtagtagctcccacctgctcgctggatgataaagaactggctttgttgaaagaactttctaccaaatgtatccgtcacctcggtattgtgggtgaatgtaacattcagtatgctttcaactctgaaacggatgactaccgtgtgattgaagtaaatgcccgtttgagccgttcttctgcattggcttctaaggctaccggttatccgttggcattcgtagctgctaaagtggcacttggttacacacttgaccagattggtgagatgggaactccgaactctgcatacgtagctccgcaacttgactactatatctgtaaaatccctcgttgggacttgacgaagtttgccggtgtatcccgtgaaatcggttcaagcatgaaatcagtaggtgaaatcatgtctatcggtcgctctttcgaagaaatcatccagaaaggccttcgtatgatcggtcagggaatgcacggtttcgtaggtaatgacgaactgcactttgatgatcttgataaagaactttctcgcccgactgacttgcgtgttttcgctatcgcgcaagcaatggaagaagggtataccatcgaacgtatccacgacctgacaaagatcgacccatggttccttggcaaactgaaaaatatcgtagactacaaagcgaaactgtctacctataataaggtggaagatatacctgccgatgtaatgcgtgaagctaaagtgttaggtttctctgacttccagattgcccgtttcgtactgaatccaaccggaaacatggagaaagaaaatctggcagtgcgtgctcatcgtaaatctatgggtatcctcccggctgtaaaacgtattaatacagttgcttccgaacatccggaactgactaactatctgtatatgacttatgcagtggaaggctacgatgtaaactattataagaatgaaaaatcagtagttgtactggggtcgggtgcttaccgtatcggtagctctgtagaatttgactggtgctcggtgaatgcagttcagactgcccgcaaactgggttacaagtctatcatgattaactacaaccctgaaacggtttctactgactatgatatgtgcgaccgtctctacttcgacgaactttcgttcgaacgtgtacttgatgtaatcgacctcgaacaacctcgtggtgtgatcgtctcggtaggcggacaaatcccgaacaacctggctatgaaactttaccgtcagtcggttcctgtattgggtacttctccgatttctatcgaccgtgctgaaaaccgtaacaagttctctgctatgctcgaccaactgggtatcgaccaaccggcttggatggaactgaccagtcttgaagaagtgaagggatttgtagaaaaagtaggctacccggtattggttcgtccttcttacgtcctttcaggagcagcaatgaatgtttgctatgacgatgaagaattggaaaacttcctgaagatggctgccgaagtttctaaagaatatccggttgttgtttcccagttccttgaaaatacgaaagagattgaatttgatgccgttgcgcagaatggtgaagtggtagaatacgcaatctccgaacacgtagagtttgccggtgttcactccggtgatgctactttggtattcccggcacagaagatttactttgcaacagctcgtcgcatcaagaagatcagccgtcagattgctaaagaactcaatatctccggtccgttcaatatccagttcctggctcgtaacaacgaagtgaaagtaatcgaatgtaacttgcgtgcttctcgtagcttcccgtttgtttctaaagttctgaaacgtaactttatcgaaactgctacccgcatcatgctggatgctccatactcacgtccggataagtcggcattcgatatcgactggattggtgtaaaagcttctcaattctctttctctcgtctgcacaaggctgacccggtattgggcgtagacatgtcttctactggtgaagtgggatgtatcggtgacgatttctctgaagcattgctgaattcaatgattgctaccggattcaagattcctgaaaaagcagtgatgttctcttccggtgcaatgaagtcgaaagtagatttgctggatgccagccgtatgctgtttgctaagggctatcagatttacgcaactgccggaactgctgccttcttgaacgctcacggtgtagaaactactccggtttactggccggatgaaaagccgggtgcagagaacaacgtcatgaagatgattgctgaccataagtttgatttgatcgttaacattccgaagaatcacagcaagcgtgagttgacgaacggttatcgtatccgtcgcggtgcaatcgatcataacattccgttgattaccaatgctcgtttggcaagtgcctttatcgaagcattctgcgaattgaaactgaatgatattcagattaagagctggcaggaatataaataaaacagctttagctgtctattagataaggagaactctctctttggcttgtccaaagggggagtttcttttttattagtaaatatagcacatcagagtgtgttctatatagggagtgttttgttattaataaatgattaaagttaattattggttgaaactaagtagaatctgtctatccatcagcaagagaagcgatttattttttatttttgtttcttgaaaagataaaatcagataaaacaatgttagtacttctatcttgtgccaagactatgagtgagacttcaaaggtgaaagtacctttgacgacagttccacgatttcaaaaagaagcttccgggattgctttgcagatgtcacagttttcgatggatgaactggaacgcctattgcgtataaatgccaggatggcggtggagaattataagcgttatcaggcttttcatgcagaagacacatcggaactgcccgctttgctggcttataccggaattgtattcaagcgactgaatgcaaaggatttctcgaaagaagaatttgaatatgcgcaggaacatctgcggttgacttctttctgttatgggttgttgaggcctttagatgtcattcgttcctaccgcttggaaggagacgtagtgttgccggaaccgggtaatcagaccatgttctcttattggaaatcccgtctgacggatgttttcatcgaagatataaagaaagcgggaggcatactctgcaatctggctagcgacgagatgaaaagtttgttcgattggaagcgtgtggagagagaagtacgtgtcgttactcccgaatttcaggtgtggaagaacgggaaattagcttcgatagtgatctatatcaagatgtcccgtggtgaaatgacgcggttcattctgaagaacagaatcgaaaatccggaggatttgaaaagcttctcctgggaaggatttgaatttaacgaatctctttcggatgaaaagaagtttgtatttactaacggtaaagaaatataaagtatgacggaagtagaaaagatgcgtagtagccagttggctgatatggctgcgccggaattgcaggtgcgttttgaacatgccaagaagctgctggcgcgtatgcggggaatgagcacttatgatgcggggtatcgggaattattggaagaactggtaccggagattcctgaaacttcaataatctgcccgccttttcattgcgatcatggagacggaatcaaattgggtgaacatgtatttgtgaatgccaattgcactttcctggatggaggatatatcacgataggcgcccatacgctggttggaccttgtgtgcagatttatacgccgcatcatccgatggattacctggaaagaagaggctctaaggaatatgcttatccggtgacgattggcgaagactgctggattggtggcggtgctattatctgtcccggcgtgacgattggcaatcgctgtgtgataggggcggggagcgttgtgacgaaagatattcccgacgacagtgtggcagtcgggaatccggcacgtgttgttcgcaaacagcttgtttaacgtttgaccggaaaagttatttcccggatttaagcgttcctgcgttactatctttgttgggaattcgttttcctgcagattctattttaattattaatgatagaaaaagaggcgcggctatctttattttgttctgtttattagatgaaccggaagaagtgaaagtggcaagaaaaaagtttttattattattcgctgataatcagagtgtttctttatttgataaaaactttcttgaaaaataatacatgaaatgtttgcagaattcaaaaaatgccgtacctttgcatcgcttttgaaacggaagtgtacgggcgtttagctcagctggttcagagcatctgccttacaagcagagggtcggcggttcgaatccgtcaacgcccacacaaaaaacgaaacacttccggctcattaacaagggcgtttagctcagctggttcagagcatctgccttacaagcagagggtcggcggttcgaatccgtcaacgcccacacaaaaaaggaagtcttacgaagaaattcgtgagactttttttatttcttacctcttttatacaaactttctttctccttttatcttataactcaggaaaaagagttaattttgcagtctgataattatctaagaaaacgtatggaacttgatgtattaacggccatatccccgattgatggtcgatatagaggcaaaactaaagctttggcagcttatttctctgaatttgcactgattaaataccgtgtacaggtagaggtggagtattttatcaccttgtgcgaacttcctttgccgcaattgaaaggaatcgatagtagcgtgtttgaaactttacggaatatctaccgtaacttctccgaagcagacgcacaacgcattaaagatatcgaaagtgtaactaaccacgatgtgaaagccgtagaatacttcctgaaagaagaatttgacaagatgggtggaatggatgattataaagagtttatccacttcggactgacttctcaggatattaacaatacgtctgttcctctttctatcaaagaggcattggatcaggtttattacccgttgattgaagagctgattgcacagttgaaaacctatgcgacagaatgggctaacattccgatgcttgccaaaactcacggtcagccggcttctcctacccgtctgggtaaagaagtgatggtatttgtttaccgtctcgaacgtcagttggctatgttgaaagcatgtccgcttaccgctaagtttggcggtgctaccggaaactacaatgcgcatcacgtggcttatcctcaatatgactggaaacaattcggcaatcggtttgttgcagaaaaactgggactggaacgcgaagaatatacaacgcagatttcgaactatgataacctctctgctgtttttgatgctatgaagcgtatcaataccatcatggtggatatgaatcgtgacttctggcagtacatctctatggagtacttcaagcagaagatcaaagccggagaagtaggttcgagcgctatgccgcataaagtgaatccgattgactttgaaaatgcagaaggtaacctgggcatagcaacgtctattctggaacatttggctgtgaagcttcctgtttcccgtttgcagcgtgacttgacagactcaacagtgttgcgtaatgtcggtgtacctttcggtcatatcgtgattgccatccagagttctttgaaaggattgcgcaaactgttattgaacgaaccggctatttatcgtgatttggataattgttggagtgtagtggcagaagctattcagaccatcctgcgccgtgaggcttatccgcatccgtatgaagctttgaaagcgttaacccgcaccaaccaagctattacagaaagttctattaaagagtttatcgaagaattgaatgtaagcgaagatattaaaaaagagttaagagcaatcactccccatacatatacggggctttaattgtttacttatataataaacgtgttttttaaataggccgtgaggccaaagtctaattttattcgaataaaaaaatgagcacagaaaacgaagaatggcgcgaaaattctttcaatgaagagaatacaggtgccggccgtgatggtaacaggtcttacaacagagaaggtggagaacgtccgtatcgcccttcttacaaccgtgaaggcggggatcgtccgtatcgcccgcgatttaatgccaacaatgaaggaggcgaacgcccgcagcgttcgtacggtgaccgctcttatggcgaccgtccccaacgtccttcttacaatcgtgaaggtggagatcgtccgtatcgtcctcgcttcaataacaataatgaaggaggtgaacgcccgcaacgtccttacaaccgcgaaggtggttcttatgaccgtcctcaacgtccttcttacaaccgtgaaggtggtgaccgtccttaccgtccccgcttcaatagcggcgaaggtggtgagcgtccgtcttatggcgaccgtcctcaacgtacttcttacaaccgtgaaggtggcgaccgtccttaccgtccccgctttaataacggcgaaggtggcgaccgtcctcaacgtccttcttacaaccgtgaaggtggtgaccgtccgtatcgtccccgtttcaataacggcgaaggtggcggctatcgcagcaacaacggcggtggaggttatcgtccgagatataataacgaccgtcaaggaggatatcgtcctcgtccgcgtaccggcgattatgatccgaacgctaagtatagcgtaaagaaacagatcgagtacaaggaacagttcgttgatccgaatgaaccgattcgtctgaataagttcctggctaacgcaggtgtttgctcccgtcgtgaggctgatgaatttatcacagcaggtgtggtttctgtaaacggtgaagtggtaacggaattgggtacgaagatcaaacgttcggatgtggttaagttccacgacgaaccggtaagcatcgaacgcaaggtatacgtattgctgaataaaccgaaagataccgttactacatcggacgatccgcaggaacgccgtacagtaatggatttggtgaaaggcgcttgcaacgaacgtatttatccggtaggacgtctggaccgtaacacgactggtgtactgttactgacgaatgacggtgatctggcttccaagctgacacacccgaaattcctgaagaagaaaatttatcatgttcatctggacaagaacctgactaaagcagatatggagcagattgcagctggtatccagttggaagatggcgaaatccatgcagatgcgatcagctatacagatgatttcaagaaagaccaggtaggtatcgaaattcactccggtaagaaccgtatcgttcgccgtattttcgaatcactgggttataaagtagtaaaactcgaccgtgtattcttcgctgggctgaccaaaaaaggtctgcgtcgcggagactggcgttacctgtcggaagcagaagtaaactacctccgcatgggttcgtttgagtaataagtcaataaataacaacttgacagaggacggggaaagaaagcaggaaagaattcatcctgcatttgaaacctcgtcttcttgtatctaaaaagaaaaagttaaatggaaaagattggtagaacaaaaattgttgacctgttgaagcgcacagatattggcgctatggtcaatgtgaaaggatgggttcgcacccgtagaggtagcaaacaagtaaactttatcgcactgaatgacggttctacaataaataatttgcagatcgtagtagatttggctaatttcgatgaagagatgctgaaattgattactaccggcgcttgtatcagcgtgaacggagaaatggtagaatcagtgggttccggacagaaagtggaagtacaggctcgtgaaatcgaagtgctgggtacttgcgataatacatatccattacagaagaaaggccactctatggaattcttgcgcgagattgctcacttgcgtccgcgtaccaatacattcggtgcagtgttccgcattcgtcacaacatggcgattgctattcacaagttcttccatgaaaagggcttcttctatttccatacgccgatcattacggcttccgattgtgaaggtgccggacagatgttccaggtgactaccatgaacctgtatgacttgaagaaagacgagagaggttctatctcttatgaagatgatttcttcggtaagcaggcaagtctgactgtttccggtcagctggaaggtgagttggcggctactgctttgggagctatctacacattcggtcctacgttccgtgccgaaaactccaacactccccgccacttggcagagttctggatgattgagccggaagtggctttcaacgacattacagacaacatggacttggcagaagagttcatcaaatattgtgtgaaatgggcgttggataactgtgcggatgatgtgaagttcctgaacgatatgttcgacaaaggcttgattgaacgtctgcaaggtgtattgaaagatgatttcgtacgtttgccttatacagacggtatcaagattcttgaagaagcagttgcgaaaggacataagttcgaattcccggtttactggggcgtggacctggcttccgaacacgaacgtttcttagtggaagaacacttcaaacgtccggtgattctgactgactatccgaaggaaatcaaggccttctatatgaagcagaacgaagacggtaagacagtacgtgccatggacgttcttttcccgaaaattggtgaaattatcggtggttccgaacgtgaagccgactataacaagctgatgacccgtattgaagaaatgcacatcccgatgaaggatatgtggtggtatctggatacccgtaagttcggtacttgtcctcactccggtttcggattagggttcgaacgtctgttattgtttgtaacaggtatggcgaatatccgtgacgtgataccgttcccgcgtacaccaagaaatgctgatttctaatatttcggtatatttatgtaaaactcgcataatcttcaggttatgcgagtttttttatgctctgaattgctgtattctcaaaataaatctttatatttggaaatacgcattcgagagtgttaactaaaataatacaacaatgaaaaagctctatttctttaccatgctttcaataatgttgttagcggtaacaggtgcgacggcccagaagaaaaccaaattcaaagcggccgatttgaaaggtatttggcagctctgccattatgtatccgagtctcccgatgttccgggagcgttgaaacccagtaatacatttaaagtattgggtgatgacggacaaatcgttaactttaccattattcccggtgcggatgcgattattactggatacggtacttataaacaactcacggacgattcttataaggaaagtatcgagaagaacattcatctcccgatgctggacaatcaggacaatattttggaatttgagattaaggacaatgattatctccatctgaaatattttatcaagaatgatttgaatggaaatgagttgaacacctggtattatgaaacctggaagagggtggagatgccggctaaattcccggaagatattgtgagataatttccaacgcacatgtgcaggaaggg

SEQ ID NO: 8272 - DNA, 5445 bp, Unknown
  gut microbiota DNA sequence
atacaaagcaggcaatgtcagtttaccttcaagcatatcattacctgtcggtttgcctatcgctctattatcaaagtaatcgaaaatatcatcttttatctgaaagcagataccaatatattcgcccaacaaacgggccagttcggcttctccctcccctacacctaccgaaaaagcggcagctttcgtacaggcggcaaaaagagcggcagtcttcttacggattacatcaaagtaaacctcctcagaaaagctatgattacttacatttgaaagctgaagcaactcgccgtcagcaagatcctgcccaagagtagacaccagttgaataatacggtggctgttcgttagttcggcatgcaccaggctggttgccagtagatagtcgcccgtcagcacggctactttattattaaagatagcattcaccgagagttgtccacggcgttcggtactttcatccacgacgtcgtcatgtaccaaactggctgtatgaagaagttccaatgaaacagctgcatgaagagtggaaggacatacagcaccataaagacgtgccaccagcaaaacaagaataggacgcatcatcttaccattcctctgccgtatgtgagatacgacactatcgagcaatgcatttgaactggagagagaactatcaaaaagttctttgaagtctcttagttctgcttcaatcggagttctgatgagtgagatgctgtccattaattacacaatttgagcacaaaagtaataataaaacgctgaataccgtatttttttgtacttttaccatgaaaaattaattaaatctatggattcaagtaataaattatttcttttagacgcttatgcactgatataccgggcgtattacgcctttattaagaacccaagaatcaattccaaaggattcaacacttcagctatactgggttttgtaaacaccctcgaagaagtgctgaaaaaagagaatcccactcatataggagtagccttcgaccctgcaggacctaccttccgccacgaagctttcgaacaatataaagcgcagcgtgaagaaactccggaagcgatccgtctttccgtacctattataaaggatattattcgtgcttaccgcatccctattctggaagttgcaggctacgaagccgacgacgtgataggtacgcttgccaccgaagccggccgccaaggtatcaccacctatatgatgactcccgacaaagattacggacagttggtaagcgacaaggtatttatgtaccgtcccaagcacacaggaggtttcgaagtgatgggtgttgaagaagtgaaagccaagtttgacattcagtctccggcacaagtgattgacatgctcggactgatgggagactcttcggataatatccccggatgtcccggagtaggagaaaagactgctcaaaaactgatttccgaattcggaagcatcgaaaatttattagagcataccgaccaactgaaaggtgcactgaaaacaaaagtggaaacgaaccgggaaatgattactttctcgaaattcctcgccacgattaaaatcgatgtgcccatccaacttgaaatggattctcttgtccgcgaagaagcagacgaagattcacttcgcagtattttcgaagaactggaatttagaacgctcatcgatcgggtactaaaaaaagaggtttccggaaatggaataacctccactcccggaagcaaagtagccaccggaaaaagcgccccctctcctcttccacttttccccgaagaaggaggcggaatacaaggcgatttgtttgcgaatttcacgcccaatgagccggatgaagcaaaaaaatcgaatctagagacgttagaatcgcagccacacaactatcaactcattgatacagaggagaaaagaagagtaatcattcaaaagttacttacatcaaaaattctctcgttagatacggaaaccaccggaaccgaaccaatggatgccgaattggtcggaatgagtttttccattgccgaaaatgaagcattttatgttcctgttccatcagatcgggacgaagcgttaaaaatcgtaaaagagttccgcccggtcttcgaaaatgagaattcgttaaaagtcggacagaatatcaagtacgatatgatcgttcttcaaaattatggtgcagtagtaaaaggtccgcttttcgatacgatgatcgctcactatgttcttcaaccggagcttcgtcatggtatggattacctggcagaaatttatctgcattatcagaccatccatattgacgaactgataggccccaaaggaaagaatcagaagaacatgcgcgacctcgacccgaaagatgtatatctgtacgcttgcgaagatgcggacatcactctgaaattgaaaaacgtattggagaaagagctgaaagagaatgacgccgaacgtttattctatgatatagaaatgcctcttgttccggtattagtcaatatcgaacggaacggagtattgctggacacggaagcactgcaacaatcatccgctcatttcaccgcccagatggagcaaatcgaaaaagaaatctacgaactggccggtgagaccttcaacatcgcttcacccaagcaagtcggcgaagtcttgtttgacaagctgaagattatagaaaaagcaaaaaagaccaagaccgggcagtatgtcacctcggaagaagtgctcgaaagcctccggcataaacatcctgtggtagaaaagattctggaacatcgcggactgaaaaagctattgggcacgtatatcgatgcgcttcccctacttatcaacccacgcacaggaagggtgcatacctctttcaaccagactgtaaccgctacgggacgccttagctcaagtaacccgaatttacagaatatccctatccgcgacgagaatggaaaagaaatccgtaaagcattcatccccgatgaaggctgcctcttcttctctgccgactattcgcagatcgaattgcgtattatggcacaccttagcgaggataagaatatgattgatgctttccttagcaaccacgatattcatgctgccaccgctgccaaaatctataagattgatctgaaagatgtagattccgacatgcgccgtaaagccaagactgccaatttcggtatcatctatggcatatccgtatttggtcttgccgaacggatgaatgtagaccgcaaagaagccaaagaactaatcgacggttactttgaaacttatccgggagtgaaagcctatatggacaaaagtattcaggtggcccaggaaaaaggttatgtagaaacaattttccaccggaaacgcttcttgccggacatcaactcccgcaatgccgttgtacgcggatatgcggaacgaaatgccatcaacgcccctatccagggaagtgcggcagatattataaaagtagcaatggcacgtatctatcaacggttccaggccgaaggaatacaagccaaaatgatcctacaagtacatgacgaattaaacttcagcgttcctgtcaatgaaaaagagcgtgtagaagaaattgtcatcgaagaaatggagaaagcataccgcatgcacgtccccttgaaagcagattgcggatggggcaaaaactggcttgaggcacattaaaccatcaagtggataaaggccacctcaataaggaattgctatcttttagatactaattgcgcagggagactccaccctatccggggtttccgcttacaaaatagaagcaagtatagataataacattatttaactcattatccagaaagctagaaaaaggaatcctttttcgacgaagtgattcattctatatccggcagattgactgccggatatttttttgtcaccaatcttggcaaaaagcaacctatcctccgccccacccattgacattttgacaatatttcatcttctaaaatgcataaataccaaattaatatgtagatttgcagcgtaaaaccaatacatttgatagacaaatgaaagtataactcaaaacttaaatagccatgaaagcaaaagtatctttaaaaatgttcgttttatctgcagctcttcttgttgtatcgcttgctacttctgcacgtagctacgacaatcaattgatttataatccaatcgaagagaatggtatgacagtaggacagaccgtttacaaaatggacggaaacacacttgccaactacatgaagtacaactacaagtacgatgacaataaacgtatgattgaaagcgaagccttaaagtggaataacaacaaggacgaatgggaaaaagacctacgcatcaactatacgtatgaaggcaagaccgttactaccaattattataaatggaacgctaaaaaacaagcctatatactggtacccgaaatgactgttacgatggataatacaaatatgtaacataaactctctctcattctaatattctaacaaaaaagatacgccgcttctgctgaagaagtggcgtattgcaatttataaggtctacattacaaaacaaaaaaacgctcttgcagttctttcagataacttcgagaaatcatcagatcgtttttatcgtgaaaaggcggatagagttgacaacacttaccatcaaccattgccaaataattaacatttacaatagccgattggctaatctgcacaaaagcttgtgaataactgataatatcttctgcttttgtattccgcttcaaattcaggcgagtctgattgaacaagactacctgccattgacgtttgtctttcagatactcaaaaaagccgatttcttccaggcgtaaaagcttgaaacccgtcactgtgctaatcataaacatgccttgttgtggcattaatgcactgatagaagaggcaaaagaaggcaaaagaggaagcgcagcagaggtcattgccttccggtaacgctccataatcactttcaggtcttccgcctcaaaaggctttaacaggaagtcgaaagccgactcacgcaatgcctgaagcaagtatttatcataagaggtgtaaaacaccaccttcatatcccacaaaatatcctctctaatttcacttagcaggttaagccccaatgtatccggaagctccacatcgagaaacaataaatccggatgcaactccataatcatctttttaccctttgcaccattccctgcaattccttttacttcaaattcacgatagggctctaactcgcggcgcaaagcatcaatcgctgtacgttcatcgtcaacgatgactaccttatacttttcttctgtctccatcataaatcataagaaaaacgaaacgggatatataccgacacttccgtaccggtttgtccatcgcttctgttggttatattaaaacgtattttatcactcttgttctttgtattcagtaattgaatggtct

SEQ ID NO: 8273 - DNA, 12363 bp, Unknown
  gut microbiota DNA sequence
aatttagaaaataaaaaaacggcttgcattgcgatcactatcacattgcaagccggttgatttattgggcttatctgtcattgaccggatattatatccagtctattgtattagatattttttactttaatcagatattcggcaatctgaacagcattcagggcagcgcctttcttgatctggtcacctacaatccagaaagtcaatccgttttcgtttgtcaggtctttgcggatacggcctacgtataccggatctttacctgccaggaacagcggcatcgggtattctttttctgccggattgtcctgaagaaccagcccttcaccgttagcgaatgcttcacgagcttcttctacggaaatcggacgttctgtttctatccagatactttcagagtgagcgcgtaatgcaggaacacgtacacaagttgcactaacctttacgtcagaatgcatgatcttacgtgtttcattgtacattttcatttcctctttcgtataaccgttttctgtgaatacgtcaatctgcggaatcaggttgaaagccaactgataggcaaacttctctacagtcacaggctcgtttgccaatacctggcgatattgttcgtacaattcgtccatagcagcagcacccgcaccacttgctgcttgataggtagacacgtgcacggtttttatatgagaaagcttttcgatggctttcagtgcaactaccatctggatagtcgtacaattcgggttggcaataacgccacgcggacgttccaatgcatcttcggcatttacttcaggcacaaccaaaggtacatcggcatccatacggaatgcgctggagttgtcgatcatcacagcaccatacttggtgattattttttcgaattccttggatgttcctgcaccggcagaagtgaaagcaatgtctacccctttaaagtcatcgttgtgttgtaagagtttcacctcgatctgtttaccgcggaaagtgtaagttgttccggcactacgtttagaaccgaacaaaactaactcgtccatcgggaagtttctctcatcgagcacgcgcaggaattcttgtcctacggctccgcttacgccaacaatagctactttcatctttttcttttgttaaattgtgaatattgaatttctttcctgtcgaatagaaaagatttggctgcaaaattataacaatttagcatataaacatcgcttttgagagaaatatttcagtttttcggtggatttctttaaccttacgcgtataatcaagtgtggttgttggacggagtgttatgtagcgttgtcgatgtcggcaagcacacggcggagatcagtcagtaagggggcgagttcttcgcgggtaatgtcaaataccagttctgtatctaccgaaagatactcatgcgagataatattacgcattccgatgatttgcttccatggggtcgacgggtaacgagcaaaaaggttaccagcagtaagttcatccacttggcgaattgtttcaccgattgtttgcagacacatgcaggtggagttgaaaagcaccatgccgctcatattggtgaggaagtcatgataagttttaacgtcagccgtagtttcaagaacaaatacagtctgacgttccacaaagcggagcatatccgctatttgttcattagatatagatcgcatcgcgttcaatattttgccggaacaactgacgcatattctcgtgcagggttaataaatctaccttaatatgaaaaagatgttcaagttcctccttgatagccatataggtgcggaaggtggttttgtgcaacttcacacagatgtcaatatcgctatcttctcgctgttcgccccgtgcggcggagccgaaaagagcaagttgctcaataccgtacttctcaccagcaacactcttaaattggcgtagcaattccagaatttcatcagttgtcttcatagggcaattctcctttcatagattactttctgcaaagttacaaaatttcatagagaataacaacgctttgagggcaatagttttcatttctagtatgtcaaagagcgatgtgggatattttcccgcttgttattctattattatctttttcttgtttttttacgcaacggagaatacgattggtaatatatacactcgttgtattcctgtgaaggacctgtataaagataatacggaaagttgcaagtggttaattcagtaatttactacttaactacttactacttgactactgaataatacgtctggacattcattgtgattctgcaaacttttttgttcctttgcattgaattcctaaagccacagcctatgaacctgtttgattttaatttaaccttaccgattaccgacccgacttgggtattctttttggtattgattatcattctctttgctccgatgatcctcggacgtcttcatatacctcatattataggcatgattctggcgggtgtattgattggcgaacacggctttcatgtgctcgaccgtgacagcagtttcgaactcttcggcaaagtgggattatattatatcatgtttcttgccggactcgaaatggatatggaggactttaagaaaaaccggacgaaaagtgttgtgttcggctggctcacctttctgattccgatggcgttgggaatatggagtagtatgagtatgctgggttatggctttctcacggcggtgttattggcaagtatgtacgcttcccatactttaatagcctatcctattattagccgttatggattgtcgcgtttgcgcagcgtcaatataaccattggggggacggctgtcaccgtcacccttgctttgattattcttgccgtcataggtggtatgtttaaaggcactgttgatggttggttctgggtatttcttgtggcaaaagtggcttttctcggattcctgattgtattcttctttccccgtatcgggcgttggttcttccggaagtatgatgacagcgtgatgcagtttgtgtttgtgctggcaatggtcttcctcggaggaggattgatggaattcgtgggaatggaaggaattttaggtgcttttctggcaggcttggtgttgaatcgtttgattcctcatgtatctcctttgatgaaccgcctggagtttgtgggaaatgccttgtttattccttatttcctgattggtgtcgggatgattattgatgtaaggagcctgtttaccggaggtgaagcattgaaggtggctattgtaatgacggtggtggcgacctttagtaaatggttggctgcctggatcacgcagaagatataccggatgcagtcgaatgaacggagcatgatatttggcttgagtaatgcgcaggctgcggctacactggcagcagtactgatcggccatgaaatcattatggagaatggagaacgcttgttgaatgatgatgtattgaacggcacggtagtgatgatacttttcacttgcgtcatcagttctttggtgaccgaacgttcggcccgccgtttcgctctggatgaaaatgtgcaagcggaagaagaagctaaacagataaataaggagcagatcctgattccggtcgctaatccggagacgattgaagatttggttaatctggctttggtgataaaggatgccaagcaaaagaatgcattggtggcattgaatgtgattaatgacaataacagttcggagaagaaagagcagcagggcaaacggaatttggagaaggctgctatgattgccgctgccgccgatgtgcctgtcacgatggtgagccgttatgatttgaatattgcttcggggattatccatacgattaaagaatatgaagctacggatattgtgatcggtctgcaccggaaggctaatattgtcgattctttcttcggacatctggctgaaagcctattgaaaggtacgcatcgtgaagtgatgattgccaaattcctgatgccggttaacaccctgcgccgaattaatattgctgttccgccaaaggctgaatatgaatcgggtttctcaaagtgggtggaacatttctgccgtatgggaagcatcctcggctgtcgggtgcatttctttgccaatgagcgtacattgatgcgccttcagcaactggtgaagaaaagacatgcaggtaccccgacagaattttccatcctggaagaatgggaagatcttctgttattgacaggacaggtgaattatgaccacttgctggtggttgtttctgcccgtcgcgggtctatctcttacgatacctcttttgaacgtctgccggcgcaactgggaaaatatttctctaataatagtttgattatcatctatcccgatcagtttggagaaccgcaggaaattgtgtcattctctgatccgcgtggacataatgagtctcaacattatgagaaagtgggtaaatggttctataaatggttaaagaaaaactgatggaaagatacgactggcaacagagaacagcactcctgttaggagaggaaaagatggaacgcatccggaacgcgcacgtattggtcgtgggactgggtggagtgggagcttacgctgccgagatgatttgccgcgcaggagtcggacggatgacgattgtagatgctgatacagtgcagcctaccaatatgaatcgtcagttgccggccatgcattccacattgggaaaggcgaaagcggaagtattggctgcccgttataaagatataaatccggatatcgaattgaccgttctgcccgtctacctgaaagatgagaatataccggaactgttggatgccaatcgatatgattttatagtagatgctattgatacgatcagtccgaaatgctttctgatttatgaggcgatgaaacgtcgtataaagattgtttccagtatgggggcaggagcgaagagtgacatcacccaagttcgttttgccgatctttgggagacgtatcattgcggtttgagcaaggcggtacggaaacgcttgcagaagatgggaatgaaacggaaacttccggtagtgttcagtacggaacaagccgacccgaaagccgtgttgctgacggatgatgaacagaataagaaatcgacgtgtggaacagtcagttatatgccggtcgtgtttgggtgctatctggctgaatatgtcattaaacgattataaaggctattatgataaaactagaaggtataacgaagagtttcggctcattacaagtgttgaaaggcattgatctggaaatcaataaaggagaaattgtcagtatcgtaggtccgagcggtgccggtaaaacgactttgttgcaaatcatgggcactctcgatgaaccggacgcaggtacggtgcagattgacggaacagtagtaagccggatgaaagagaaagaactatctgcgttccgtaataagaatatcggttttgttttccagtttcatcaactgttgccggagtttacggcattggaaaatgtgatgattcccgctctcattgcaggcgtttcttccaaagaggcaaatgaccgtgctacgaagattctggatttcatggggctggttgaccgggcttctcataaaccgaatgaactgtcgggaggtgagaaacaacgggtagcggtagcgcgggctttgattaatgacccggcagttattctggcagacgaaccatccggtagtctggatacacataataaagaagatttacatcaactgttcttcgatttgagggaccgtctggggcagacttttgtcatagtgacgcatgacgagggacttgccaaaatcacggaccggacagtccatatggtggatggtatgattaaaaaatattaattagagaacctaacttctaaaaatgtataccaaaaaggtagagccttgcaagtgttctatcttttagctatatatttatagtcgcttctctacggaagtctgtgaagatgatagtagagtgtttgttttgtttgtgtgtgatgcattcttgtctggtgtgataggaatgcatctttttttatttattataacaaatgtagggctcgatccgttcaagatcaataggagtgaactcctcataaagggatagttgcttcagactttttaagattcctttctttttccgatattctatgatgaccttcgcttgatagtagtttatgtatggatgacgcatcattcgttccataccggctttgtttaaattgatacggtgtatctgatgggtgtcaatagaaaaccacgggcggagcctttctgcttttagatgaatctcctgtaactgctctatccggcaaaagccccccagtcgttcgcggtaattcacgatcatccgggcaatgctgctcccgactcccggaatctttttaagttcggtggtatcagcagagttgaggctgacgacagttcccggttggtatttcacaagagtgtcccgttgtatgctttgtacggttaataatcgtattgtatctttatctttcgaactgaaatcttctgtaatttggatataaggatgaagagtctggtattgttcttctgtgagtccgtatatctttcgaaaatcctccggatggcggaatttgccttgtttatggcgatagtgcaggatattctttatcatccaggatggtaatccgagcgaaaggaaagtagtggagtctgcggtgttcggatcaaacatcgtaagcttgatttccctttgaggggttgatggaaaagaatgaccgaactttgggtgaggttttgtttccaggagagaggcaacaaagtcattatattcttgatcggatttcttattctctgtgcagtcggtatcttcggcacgagtgaaaaaggcaaagagttcaggagttgcatatactcctaaaataagaacgacaaggacgataatgccttgtcgttcggttttagtataataaaggaagtctttccacattatagcttgattagccccagttcattgataaatatcagtgagatggcgattggtgcgatatattttaatataaagataataagcttgtataccggtatctttaacgagccgtcattggtaatttctgaccatacaatctttttatccagataccatccggtaaagagggagatacacagtccgccaagtggtaacatgattttagctgttacgaagtcgaagagatcgaacattcccagtccgaaaacggtgaatcctttcatgactcccaatgataatgaacagaatattccgagaaagacacaaccgccggtgactaaccttgctgcttttccacgggaaagattaaactcctcgtgaagataagcggttactacttcgtgcaaagaaatggtagaagttaaagcagccatcgccaacaatgcgtagaacattacagagaatatgtatgctagtacgggaactccgccaaatgcctgttggaatacattaggcagcgtgataaagatcagactgggacctgaatccggttgtatgccaaccgaaaaggctgccgggaagatgataaatccggctagtattgccacaaaagtatcaatgattcctacactgaaagcagttttagtcaggttggtttctttactgaaataagaggcgtaggtgcaaaggcatcccatacccagactcaaagagaagaaagcctgtcccatggcactcaaaaacacatttccgtccactttgctaaaatcgggtttgagcaggaattcaatacccgcaccagctcctggcagagtgaccgaacaaactaccagtatgaggataatgataaacaaggtaggcatcatgatcttcgaagacttttcaatccccttttctactcctttcacgatgatgaaatgagtaatcaataaaaatgctactaaccatacgaccggtcgccacgggctactggaaaattgttggaaagaagagataaactctccggagttttttccggcaaagccattggtggcagcctcaaaaatatattcaagtgtccatcctgctactactgcataataactaagtatcagaaatcccgccaatactcccatgcgtcctacccaacgccaatgcgttcccggagctagtgtttgatacgctcttgcagtgttggctcttgatcggcgtcctatcaggaactcggcaatcataataggcaatcccaagagaaagatgcaacctaaatagatcagtataaacgcggcacctccatgatttcctgtttcgtatggaaacctccatatattacccaacccgactgcagaaccggcagaagcgagtataacccctaatttgctgccgaagttcgctctatcaatttttgccataaatcttgttttatcttacaaatcgttataaaatatacgagttaaagtgcaaatatagaaaatgatacttatatttgcacgaaaattgtaatattatttagatatgctatcttatattaagaaatatcctatctcgctttttatcattttgacagtgatttatctgtcgttctttaaaccgcctaagacggatttgaatgaaattcccaatttagacaaactggttcatgtttgtatgtatttcggtatgtcggggatgttgtggctggagtttttgcgtgcacatcgcagggatcatgctccgatgtggcatgcgtgggtaggggcgttcctttgtccggtgcttttcagcggttgtgtggagttgttgcaggaatactgtactacttaccggggtggtgactggttggattttgcggccaatacaacaggggcgattctggctagtttagtggcctattatgtcgtacggccgaggatgaaaataaataaatagtaaaaggcaacctatgaacaacaaaggtgaacgatagcaaataataaacggtgaataatggatatgatatagtcaaccattattcaccgtttatcatttatcatttgaagtttaccattccggctttatagaaattctaccgttgaactaagcttgattccattggaacctttaataagaatggtatatcctttgggcttatcttcttgcaaatcctttataacttcctgcacatttgcataagttttaaaagaatgttcacttgcggcaaactgttctcccacgagccatactttctcaaaatcactttctttgatgtagtcaacgattttctgatgctcggccggtccttcagcacccagttcgcgcatatctcctaatatgagcatcttgtggggaactgtcatattccggaagttttgcaaggcagccatcatgctggttgggtttgcgttgtatgcgtcgatgataagcgtgttatcttccgtctttttaagttgggaacggttattctgtggcgtatactctgccagagctttatcgatcttctttgcttccactccgaagaaacgtccgatagtgattgcagccagggcattggggaaattatattctccgatcaactgtgtacagacttgatgagcttcactgtctttaccggctttccattcgaaagcaagataaggcgaattgccggtaatccggccgttgacatagagatcatcttctgttccataagaaatcaggttcaatccctgtgagatattcatcaaataggggttatcgtgatggataaaggtgatggcatctttcttgcggaggaaatcataaagctctcctttggtcttgataactccttcgaaagaaccgaatccctccagatgagctttgcctacgttagtgataataccataatccggttcggctatttcgcaaagaaacttgatttcccccggatggttggcgcccatctcaatgacggcaaggtcatgctccggttttaaccgtagcagggtagtcggtacaccgatatggttgttgagattacctaaagtataaagcacattatggttttggcagagaacgctggaaattaactctttggtggttgtcttcccattagtgcccgtaatgccgatcactcgcgttccgagttggcggcgatgatagttggcaagctgctgcatggtttgcaggcagtcgtctacaagtatatatcgttgatcgccttctatggcatactgtatttcatcgataatggcaaacgcgcatccggagtccagcgctaatttggcaaatgcattaccgttgaacgactcacctttcaaggcgataaacaaagaaccgtccgggcagttccggctatcagtagttactgattggcaatccagaaaaatctggtaaagagcagaaagtttcataacctgatcttttatttaaaacgttgcaaagataggctattctttcggatttaatgggagttcggacagttttttgcttaagcatatatcaaaggaagagtcaggatcatccggcatccttctgtataagaagtgtcgatccggaggctgcctcctaacttttcggcaatactccggcatatcggaagtccgagcccggtgccctgcgtgaaagagttcattttgtagaaacgttcaaatactgcttcctgttggtctttcgggatgcctgttcctgtatcggtgacgctgatttcaattttcttttctgcttccaatacggaataagcgatgcgaatactgccacgagtcgtaaatttagcggcattatgtgccaggttgttcaatacttgtgatatacgttccgaattactgcgtatgagcaggctttctctttcaggttcgaataaaacctccacatctttctgcgtgttatctttggcaacttcagatgcaagttgacagattgcatgaaggtctgtttcggcgtcagtgggcagttgttcatattgatccagttcggacagcgtgagcacatcagtcaccagtcgaagcaagtcgttgctgttgcttttgatgatattgacatactcttgtgtttccggactgttgctgtaatggtcgcttaatacctgcgagaagcctacgatagagttgagcggtgtgcggatttcgtgcgtcatgctctggataaatgttgttttcatccggctgcttgcctccgctatatctttggctttacgcaattcttccctcgataccataagttcttcattccttattttaagttcggcttccgaaactttcagtttgcgtttcaggaagttttctctataaaggaatatgaataaaatacctaataaaataatcaatgaaataatcaaggttgttttattatgcaactccttctgttgtgcctgaagcatgagttctttcttttcggcattgagtttttctacatttaataaggtggcgaattcgctgctggccacttgctcattggctattttcaaagagtcatccgtgttgatgtacatttgcagatatttgaccgccagattcatattccccatcttttggtagatttctccctgtgtgcggtaatggatgctgctaagtatgctttcgcttaaacgacgttcttctttttcctgcatttttgcggcttccagcgctttcggatattgtttggtctgctggtagtataaacattctatattatacagtctctttttgatagactccagtcttttgtcctgttcaaatgctgcctgacactccttcagtaatttttcggcagcttgaaagtcgccgaacttgctgtagtagtttacgaattccaacttggcagatatttgttgcgtagaggaattggcagttgcaatggctttttccacagcagccaatgcttctttttgctttttctggttgatgtaatagttggctatctgggcataagtctgggagatgttgtagttttcgagcttgtatttttcagtcagctcaatttctttcaatcgccactcgaacgccatcgaatcgaatcttttgatggtgtagatttgcgacatgatgttatagcaacgggagaggccggtcttatcatcctcttcttgagcttcttttaacatattttgcacttcataaagtgctatgtttgttctgcttgtttttaggtaataggtaattaatctattagcccatgcgaagtaatagtatttaggctgatgagtggccttggcgaattcttttactttgttggtatagtggattacgctatcttcattggttccttggaaataataataatccagttgagtggctatggctactgcctgcattcgttcgtcctgccgttcgccggccattcggaataaagtgtcggacatattaagtacaacaggctctaataagtattcttgacaacgttgataatattcatagagagtagagtcaacattgaaagtttcagcctctttttgagctttagcagtagtggtaaagaacaaaatgaggaaaagaaatcctacgcgaaatagggttaatcggctcatggtatgaatttttcgggttcttctatagtttgcaaa

SEQ ID NO: 8274 - DNA, 3726 bp, Unknown
  gut microbiota DNA sequence
tagctggactccctattattgtgtaggattactaacagcagacgccaatgccaacctgttggatcctactttctggaagaaacatccgacacctgtatttcagcaggaaccggagaatgaagtttttggccccggcggcagttctttcgtctcttcaccagatggaaaggaatgttatatgctttatcatgcccgtcagataccgaatgatgctccgggtgcaatggactcacgtactccccgtttacaaaaaatagagtgggacaaagatgggatgcctgtactgggaataccacaaaaagaaggagaacccatggcaaagccatctggttctccaatcaattagactaattacattttgtactttcaggtccaaggtatgaacgttttaatcctcccatgtcgatgactattttttgaatgacaactccaggatcaccacaacgtatctgtagagtgtgtttgcccggcttcttcacatacaaagtagatttattcactctacaattctttagcacactatcataccaaacttgagaatactcaatagcagaagtagaaggagtagaaatagaaccatcatctatacggacactatactttgtgtccgaattagtatgttccggcaatttatagtctcgttctgcgtgcaaagggaatgtaggtagaacataggtatacacatcataaatcccggcattaaacgtataaaaatcatattccactctaggtacatcaccagcacgatacatctgtaagggagatataggattccctaattgcaaagcatgcccttcaaccccaaccccgggaagaatattcatttttatgtcattactctcaaacttacgatgaaaccctgcagccggaatagagacatacccattctcttccatatacactccttgcatctcatcacgcacaggagacgccggattaaaaacagaaaccaatacacaccctttttgctcattagagctaaacaccacagaacctttaatattctctccaaccggaactttctcccaatccacagataccctgatccggtcttctgtcggagttttcccagctttttgagacactataatccaatcgtccgacggctttgcagtccaactcaaatctccacttccttgattatacacatcgacccaatggcttttacgggaaaaagtgttataaacaggcaaactatgatagcttatcccacctttatccaaaatttcactttctgcctgaagagccaatttaggagcaccaaccggtgtataactttcttccatcaacgggagcataaagtaagaactggaaccttcataattctgtttcaaagacatcatatatttccatttcccgttcaacaaagaattatacccttcagttatgatttgcagactatcatggtaattctttaccttctcctttatcaaattggcggcggcacgctgctgacgaacatactgccgataatattgtccttttatagtcatgtggttcatcagttcggcacctttcaccgggtagtataataactgataaaaagccggctgactgtctttatccaaagatgccaaaagattttccgctttcttcccaatgcggctatattcgttcagacgattttctgcttcattataattggcaaaagagaactccgtatccgtacgtttctctcccccgccccaataattattccaatatccccaacccatatattccggtttccgggaaaaagccaaattgatatgcgaagaagtgatatcttcaaatacgctataatactgttccccaaacatctttgccaaccaacgggcgggataggtaaccacattattcgcattaaagctatctatatcataagccatatcaaggaataaagagacttgcatttcggctccttttaaatcaccgcaattagccagccagatacggtctgccgtcgtatcataagcctttcggagttcctcatacatcagagccgggggagtagtactgtaccacaaatagctatggggaactcccagataagagacatggtagtaaacacctgcacgcccggagcgcttctgttcatgcgggccacttaagcgcttcatgtagccgaagttatcatccggccaaataatggttacatcatccggcaattccaatccattcgaatagatttccaacacctccttgtatggagtaaatgcctgtggaattgtttcaaccggtcgatcaatatgttctgcaatcaaattacgctggtctttcaacgcactctccagcattttgaccttttctttcatggggacatcacctcctcccattgccgcatcatgcaatcctctcaaagccaatgtatatacattctcataagcacagttttcctttacacggtttcctagaacttcattaattttatccttatttttaccataatcccaaggccccatcgtttttgaattccattcactagctgtattcaacaataatggttcgcaatgactggaccccattacaatagcaaaagtatctgccaccaacttattttcaggtatcttataaaatgcggtcgacaccggatgcatggcaggagccagatgattggctttcaaccgtaacaacaattcgcatattttggcataagtacggggacctatattgccacgctctttctcaaaagtcttagcagcccaaggtttcaatccccaatcttcatcattcagaaaaacacctctatatttcacggaaggggtcttggaaacagtggtgggagcatccacataaagtgttttatgtttcttcacaggggcatccgcccaccaataccaaggagacacacctgccatttccgaaagagaaaacaaaccgtaagaagctcctcgcctgtcactcccggctacaatcagcgctttatctactcctggaaaaggatgattaactgtctgaatcagataacgttcccatgctccttccaaaggagatatatctattttcccattggaggctagctgacgaattgcctgattcttttcaatagtaccgacaatcaccactgtttttcctttcttccattcatctgccaattttaatctctgtcctgtgacattttcaatatcagacacaaacagttcggcaaccttctttacaaccgggtaatcattggcatcataacacacggccgcttttattttcgatgcgactaatgggaaagtatatttactatgttttacattctcattcacaaccacttgtgattgcagggcagatgccactaccaataatattaatagcgaaaagattctcattgatacagtagttctagttattcagttctatttatttttatcttcaaaatgatagttatatggattccgcttaaaatgataacgatttcttggcaccggcaatgggtcttgtacacgcagttcccaagtcatcaattcttccagcaattccaattgtttggaggcatatttctttttattataaagattattaatctcggaaggatcggatttcaagttatacagttcaccacggccataattgtcgagcaccagtttccagtcatctttgcgaaccatacgttcagttccgctttgtgtccaagtattcagttcgtcaaagtgagctattttattgggttgcaaagccccctctttaacaaatgtcaacggttcatcccgagtgaaatcttcaccaccaaaaccttgctgcaccataatgcttgaaaac

SEQ ID NO: 8275 - DNA, 2474 bp, Unknown
  gut microbiota DNA sequence
cctttccactctagtggaacgatatggctgcttatacataaatatgctaatgtctactctttatactccgcatgtccattttataatctattatttaagtattacctgattacatctctagcttggcttgacttcataatagtctgatgcttcctttgccttgtagtagactctttttttactgcgtgtttcgttgcagtccatgctaactattacggttttgtcgaagaataacttgaatactctgcaaaacaagtaaaaaagtatttggaatcgcttggaaaatctatgagaaatgtttttgaaagtgatgaaaagctatgagaaatacgttgttttatggataaaacgctggtaatactatgagaaatgccgttttgaaaagtatttctcatagtgttatgcatttgatttatatatagttattgtatttactatgagaatatgagaaatgaaaattgaaaatcgtttgcaggaacctgccctgagcgtttttattttgatacaatcagggcaaacgtccgcctgagtttaattcatcaatacattgctttaagtcgtaaggacaaattagtggggatttgaaagttgccaatatatagctataataattttatgtctcatacctatttctttgtcaaaattgtttgtttgctaaatataaattgctacttttgtcgtagtttactttcgagcgatgaaggtaactttttaatatttttattgagaacggttatttgttacattcatatataaaatccgctaaattttaactttcgtgaatggaatgagtgacaagtctcgcgcacttttgtctgtataaccttgttatatactcagttgggcgtggggctatcattcatgttcacgaaaggggtcttagcggatacctatatatggcatgaatagatagtttccacgctctttcttttttataaaccctcgcaccatcgggaactgatgcggtaaataacgcaacctatgtacggagactttaatcgcattgttgtccagctggttcagcatcctgtcatgcacaaacctctctcggatttaacctatacggaatgtgaactggcctatgctttgataagagaattgattgatttgtcaactgaaggtgattatactttattggactatatccaaatggctcgcctggagtattatctgggtgagttgtcttgtaagatcaactgtagtagggaggaaactgcccttcattatgcgggcgcccttcatctattagaaaaaggcggctttgatttgaacataaagaagtgggttgaacttgtcagcctacgaatcgagaactctaaaaaagaatgacattctgattttgtatatagaatctgatctgtatccactcagtatttatccggcatatccatatggaatagtcaaccgttagactgcttagaacaagtattctaacggttgacaataaattctcttgcttttataatatttttctatatatcctgttaattactctattagtcatgcccaattaaccattccaattaatccatcccctttaataatctccttttgtaatttccctttgtggtatatccctagtattctttttacatttcgttctttttcttgttttccttctatatcatcttcttgtctctttcttcctgttgtctttttctcagctgtaattcgactgtaattttgttatttctttcttctgcatctttttctctcttgcgttcgcctacgcgcccgcgtgtgatataataatgtgtctcatgtgtaccgtttccgcccccaatccactcatgataaaaaatatgttctacaacatcattatccttcagcactttagccgattctttcaaaaaaacttagaaaaaagagtttaatatatttggattgtatactaaaagggcgtacttttgcacccgctttccaagagaagaaagccttgcagaattgacatagtgaaaaagcgaaattgtgcttaaagaaaagaacaaaaaaacttccgaaaagttttggaggataataaataaagttcttatctttgcagtccgattcgcaaagaaaacggcctttctttttcttttgtgcattctttccctttcgcatagagagcctgagaaatgagtaaaaagaaaaaaataaaaaaaacttccgaaaaagtttggtagttaaaaataaagcctttacctttgcacccgcttttaaaacgaaagcagcaagttctttgaaatattgataaacaatacaagtagtacaagtaaaaaaatagaaccgtcaatacttgtccgagagagtagcgatacgattgaagataataggtatttgaataaggtcaataaatttacggcgtcctgaacagagcaaaaaatcatcttaacagatgaaaaagatacttttacaatgaagagtttgatcctggctcaggatgaacgctagctacaggcttaacacatgcaagtcgaggggcagcattttagttt

SEQ ID NO: 8276 - DNA, 1479 bp, Unknown
  gut microbiota DNA sequence
agagtagagatgaactctttcgcgttgtcgcgaatctgatcaggactgaatgataccttaccgatagaagtgtgaacgataccgctcttatcaactttaaagtcaatcttaccttgttttacttcttttacagccttagcaacatccatagttacagtaccactcttagggttcggcatcaatccacgaggaccgagaacacgaccgagcgcaccaattttacccatgatagatggcatagtgatgattacatcaatatcagtccatccacctttgatcttttcaatatattcgtcaagaccaacgtagtcagcaccagcttcttttgcagcagcttcagcatccggtgtacaaagtaccaatacacgtacttctttaccagtaccatgaggaagtgaaacaacacctctcaccatctggttagctttacgtggatcaacacctaaacgtacatcaatatccagtgaagcatcaaacttagtaaaagtgatttcttttaccaaagatgcagcttctttcagtgagtatgctttccctgcttcaatcttttctgcagctaacttttgattttttgtcagtttacccattacaattgaagtttattaattattaaccgggaactccccttttacagcgatacccatacttctagctgtacctgcaaccattctcatggcagcttccacagtaaaacagtttaagtcaaccattttgtcctgagcaatcgtacgaacctgttcccaagtaagctcggcaactttcttacggttaggctcagcagaaccactctttaccttagctacttcaagtaattgaatagcaacgggaggagtcttgattacaaaatcgaaagacttatctgcgtagtaagtaatgataacaggtaaaatcttacctgctttgtcttgggttctggcattgaattgcttgcaaaattccatgatattgatacccttagaacccaaagcaggtccaacgggaggtgatggatttgcagcgcctcctttaatctgtaacttgattagtccagcaacttctttagccatttttttattgatttatatataaacattaaacgaagaacaacaacagcgtaacaattccgtgttattccttttccacttgcataaagcccaattcaagcggtgttttgcgcccgaatatcttcaccatgacctttagtttctttttttcactattcacttcttcaatgatgccactgaatccgctgaaaggtccaaaagtaacttttacagtttctcccactacgtacggaatattgagttcttcacccgtttcctgcagttcgtccactgtaccaagtatacgattcacttctgattgtctgagaggcaccggtttttcggagccgcctaaaaagcctatcacattcggagtattgcgcaggtgatgagcgacctcaccaaccaaagcagcctccactaaaacgtagccaggaagataacttctttccttcac

SEQ ID NO: 8277 - DNA, 666 bp, Unknown
  gut microbiota DNA sequence
atcaggaataaagtaaatccgatcagggcgaatggtacacccgccagggacggataacggtagccaccattaacagccagtccgcctgcataagcaccgatggcatttccgagattgaatgcaacctgcacgcaggctgctcccagcatttctcctccctttgatacgcggataattaatatctgctccggactggatacagcgaacagtcctgccgtacaaaggcacatcaacagggctgctgcccatttatagggagaaaggaagaagatgagcaataacataatacagataagtgcttgagcggcagttcctacttttccgggggtgtagcggtcggagagacgtccgctaatcaggtttcccactaccataccgaagccggcaaggatcattaaaggcgtaatgctttccgcggagaagccggacacattggtaagcatcggattgatgtagctataccagcagaatacaccgccattacctaatgccgtagcaccgagaatcagccacggagccggagttttaagaaagcggaattgtcctttaaagccggtatccttcagaccctctacatgaggaacccatcgccagatataatataggataacaattccccagataccgaccagcaggaaagtggcacgccaggaaagcatggtactt

SEQ ID NO: 8278 - DNA, 4431 bp, Unknown
  gut microbiota DNA sequence
agacgctctataaagtcgttggcgctataaatagcactatataaggatgcccatgtattttgtacatacgaattgttgggattgaatgcattagccggatattcacggaaactactggtactgtttccttcacattgtgccaggtcattagttaaatcaaatatgcatgataggttcataccataaaggttatctgccaccatgttgcggtaaactcctaacaatacattgttggcttcagatgcattgttcatatattggttctttctaatatctgatttcggatcttcatccaataaatcggaacatgaagtgaaagacaatgtgcataaagccagtgctgatatataatatattagttttttcattgttatactcgtttaaaattgaacatcaagtccgaatgtaaatactctgctctttggatatgcaccccaatccagaccgggagtcataggattgctggctgctgtgctgacttccggatcatatccgctatatccgctgatgcagaacaagttctgtgcagtaccatatatgcgaagtttggatatgtggattttgttaatccattttttcggcaggctgtatcctaatgtcatgttcttcagtcgtaggaacgaaccgtcttctacgaagcgtgagtacacgtctccctttacataccctttcgttgagggtactttgttggatgcattggtaggactccaacgatcggcaacttctgccagcatattgtagcgctggtcttgtgaaccggttgcaaactgacgggttgcgttgaacacatcattgccatagctgtattgtaacatgaaactaaaatctattcctttgaaactaaaagagttggtgatacctccaaaccatttcggcatggcattaccgatgactgtgcggtcggcggtagtgatctttccgtcaccgttttggtctttgtattttactacgcccggagcagccccaccatcataacgtgtgttgtttgtaatacccggcttcaagatgagttttcctgtagcggctgaagtgtagaaatcgtctacttgataaataccatcgaattcataaccgtaaatcaatcctaatgattcgcctactatggcacgatagtctgattgagtataattggttctatcgaagttagaatatgcttctgcataattggcaccggaagataaagctttcagttcattgcgaatgaatgaaatattgaagtctgtactccaggtgaaattacgattttggatattagtgctattaatagccaattcgataccgcgattctggattttaccaatattctgcatttgtgatgagaatccggtaacatacgctaggttttgcgcaagtagcaagtctttggtattcttgataaagaaatcagctgtaacattcaggcgattatcaaagaacccaaggtcaacacctagattggtagtacttgaaccttcccatttcaaatttttattcttcaggtgagattgagtcagtacagtggaagttgtgttaccaataccatatttactttgtgtatagaggtctaatgacaggaaattagcaatacggtcgttacctacaataccccatcctaaacgaagtttcatgttagatacaaaaggaagattctgtttcataaatttttcttccgagatacgccatgcagcggagaaagccgggaaaaatccccatttatttttgtatgagaaaacagtagaaccatccgcacgtacagtagctgtcagcatatatttgtcgttgaatgaataatttccccgcgcaaaaaatgataacatggttttatctccaaacgaggtgtttactttactgggaactgcacctagacctagattgtcattaccgatattatctgaagggaaattttttgcttgtcccaataagaattcggaacttctgtatgcgagttcctcacctaacattatttcataacgatgttgctttattttttctacccatgttaactggttgtaattggtccaacgtttttcgcgtcccatctgagtttctccataaggcatttgaccgttagtgtaggcctgtcttgtctgagttttgtagaatacatctctacgggtgttggtcgtattgtatgtaccagctgttttaaatgttaatttcttagtgatttttgcagtaagagacaaattggcactccacatttcagagcgcttgttgtctgtcgtattttcagcttgtaggatggggttcacctgtgctagactttcgcctgtttccaacatagccgggtcgatggcactggctagtaattcttcattggttttagccagacctcctgtaggacgtgatcttaatatctgtcctaacatattgaaacgtcctccatcaccggaagttccggcaccttctttcaatgtattggaataattgatagtagcatcggctgtaatatacttattaatcttctgattgatacgaactttaccggttgttttagtaaaaccgctatttctgaaaataccgttttctttgtaatgagagaaagaagcagagtatttggtaccgtcattacctcctgttacggaaatgttatgatcttgcgaccaagtaggactgaaagtttctccttgccaatctacagattctactccaatatagtcgtccaaagtacgatatttgtaatactcccctgtttcgggattgatttcgttgcggtaataaccggggataaacttggtatctagttctccctgtagttttacaaattcataggcgttgagcaagtctaattgtttggtgattttacgataagtagcagaaccattgtagctgactactggtctacctaccttacctgatttagtggttaccatcactacaccattagctgcgcgcgcaccgtaaatagctgatgaagaagcatcttttagaatttgaatagattcaatatcagagtttgccaagtagtcaatgttgtcaacttggaaaccgtcaacaatgtaaaggggagtagcgtcaccgtttaatgttcctacaccacgaatcttaatatcaaatcctgcgcctggagttccgtcagtttgggtaatttgtacaccggccacttgacctcctaaagctgccataacagaactacttttaaattcttctatatccttggcggcaacagaagctacagaaccagtcaagtcactttttttcatagaaccataacccactacaataacttcatcaagcactgcattgtccggttccattttaatgtttaactttttgtctgtttgcgcaattttcacttcttgatttttataaccaatatagctgaataccagtgttgaacctttttgggcttggatagtgaagttaccatcaaaatcagttgtcgttccggtttgacttccttttaccatgacggtagcaccaatcataggcatgtctgtttcgtctactaccacacctttgacgttttgtgccgaaacacagattgtagctatgagagctaagagggtgaaccaccctcttttgcttattgcttttgtatatatattgtacataattgtaatgtcttttaatttagaaattttcatcaaaccatatcaataatgggaatgctttgggacaattcttatcagagcttaatttgcctgaatctccatctgttctataggtcatttgaccagtcataataccattggcaaattgtccgttttcttctccatacgtaggatcaccaaaccatttgttgggattaatggtaacagcccatcctttggtcgggtcgacataacctaatgcatctgataacttcttattaattttgttagaaattccatcataataggacataggtgctcttgctccataattgggtgctgttgatccgtaataattacgccatacttggttcataaatactgttgcatctactttatctccagtagtgattgctcccgatttatgtgttttaggcccttccagattttgataacggaatgaacgacgataatccattacaaattgtgaaacatctgttactccgactaacgtaggttctacagaaattcctccctttcttggatttactttgaatacaaatggagtatattctattctaataggatttgtactaggattaaagtcaaaagcaacgaatgttttgaaagttcttgcaagatcaccttctccggcagtggcttctattataagataagccataggagcatcagcttctttgaaattatccggggagaatcggactacacctgttgcttcatcaatcataggatatcctgtttgattaggatcgtctaaattgaatttagtggctatcttccatttgaaaacaatacctttatcatctaaattcgtttctggagttaaaaccaaactacccaattctgctgcacttctaatacgatattgtgaagcttctgttgccttatccaatccgag

SEQ ID NO: 8279 - DNA, 22111 bp, Unknown
  gut microbiota DNA sequence
ttatatttctcctgacgactgtaaatatcaagaagactgaacaaaggctcctgctttgacgggaaacgggttaccattttctcaagcaacgttacagccttatccaactcgttctgttgctgatacaggctgaccagcccctggctataccagaaattatcaggagcaaaagccaccgcctgctccaaagccgcctgaccttgcggcacctggcggaggaacatataatactgcgatatttcataaagcgccgaagaagcgttcggattgatatccagacaatgctgtaacaatccaaatgccgcatcatactcattcttttctttcatccgcatggcttccaaaaagaagtagtcatatttacgctgttgttcagcaggaagcaatgattcttttaccgaaaaggatgcatctgccttcactgctgtttttgctgtacgcatagaacgggttcccccacacgaagtgagcactaacactgtcacgaacagccatcctatttttatcttcattctattttttcgattaagcattcatcatactccggtatgtccgaagccaccggctccgcgttccgtttcatccagcacctccacttcctgccatacaggctgttcgtgctttgctatcaccatctgcgcgatacgttcgccatcttcaataacaaaagcctcggacgagagattgactaaaatgacacaaacttctccacgataatccgcatcaatcgtacccggagaattaagtactgtgatacctttctttatcgccagcccactacgtggacgaacttgtgcctcaaatcccttcggcagagcgatatacaatcctgtcggcaccagacaacgttgcaacggttccagtgtgataggttcagaaagattagcacggatatccattcctgcggacaattcggtggcataagccggaagcggatgcttcgatttattgataacttgaatattcataaatgcatgtttactatttaacgggcgaaaatacacattttgaactgaaaaatagttaagtttgcagttaaataatgtaccgttccctaaattgtaaatagtaaatagttaaatcgtaaataaaatgatgaattggaaacaactaatatcagcgaaacgtttcgggatggaagaattccatgaagaacgacaggaaaaccgatccgaattccaacgggactatgaccgtcttattttttcggctcctttccgcagattacagaacaagacgcaagtattccctcttccgggcagcgtttttgtacacaaccgacttacgcacagtctcgaagtagccagcgttgggcgttcactcggggacgatgttgccaaagcacttctggaacgtcatccggaacttcaagattctttcctgccggagatcggttctatcgtctcggccgcttgcctggcacacgatttgggaaatccacccttcggtcattcaggtgaaaaggctatttctacttttttctctgaagggaaaggagttcgcctgaaagaaaagcagccgaacggcgagcaactttctccgatggaatgggaagatttgacacattttgaaggaaatgcaaatgcgttccgaatactgacacaccagtttgaaggacgtcgcaaaggcggattcgtcctgacatataccactctggcttctatcgtgaaatatcccttttcatcgagccttgcaggaaccaaatcgaagtttggattcttcgtcagcgaagaagaaagtttccaaaaaatagcaactgaattaggactgaccttgctcaacgagcatcctttgaagtatgcacgccacccactagtctatttagtggaagcggcagacgatatttgctatcagatgatggatattgaggatgcatataagctgaagattctcaccactgaagaaaccaaagaactattaatgacctatttcagcgaggagcgacaggaacatctccggaaaacattcctgattgtcaatgatgtcaacgagcaaatcgcctacctgcgttcttccgtcatcggtttattgatccgggagtgtacccgtgtctttttagatcatgaacaagaaatactgtccggcacgttcgaaggatcactaatcaagcgcatagccgaacgtccggcagcagcctacaaacacagtgtcgaagtatctatcaataaaatctaccgttcacgggacgtactggatatcgagctagcgggattccgcatcatcagtaccttactagaattgatgatagacgccgtaacctcacccgagaaggcttattccaaactcctgatcgaccgggtatccagtcaatacaatataaattcacctgtactctatgaaagaatacaggcggtacttgactatatatcgggaatgaccgacgtctttgctcttgatctttatcgtaaaattaacgggaacagtctgcctgcggtgtaaccactttaggagtaaaaacctcttccccttcacaagaagacaatctcaacgcatccggatggctttcaataaacgtctggatgtgtcgaattcgtttatcttcaagaatttcgtctacagcaatcaggataccggtttcttccacatcaccgaactcgtaattgacagctgttccgaacatacgcatcgtagggcttaagctcatatacgcatttaccaacggaggaatattatagcccaatttacggatttcacaattcaatatcttatagtcctctttaaaagtactcttgcagaacaatgcgttcaactcttcttcggaagtctcaagttgcagaggctcaatcggagtaacaagtttctctttatcataaaaatgtttcttgaggaaatgaagaatcatatcacggccacgacgatggtagctaggatacatggtcaccttgccaaagaaatacttcacattcggcataaccacggtcaacgctcccaacccatcccacagattatccaaagcgaacaatcctttgcttccggcacgggtagactgatattcaagcgtaacaaacgaacgccccagctcaattgtctgcggcaggtattctttaataaaagcatcagaaaaatgaaacatgtgggaagtagccagaattggcgcgcctttttcatcaaaacgcacgtccgtaccaagcagataccggtaaccacccagaatttcttccgcttccggattccatacgatcaactgcttgtaggggtgttccatcgtgtcgtattcatcaatatccattgacaggcctgtacctccaccagcagcacggaaagctatttcacgcaaacgaccaatctctctcattacattaggagcattctgatgagtaataatataaatctgattattactcttattcgtcattcgtaagcgtttgtcttccgtcaattctgccttcagcagttctttgcttaccggtttaataatctcttccatattccttgttatagttgttctatcagttacagtttataaacaatatcctttacgtattcagcccactgcgcaggggttttcgatttatcaaaagtctgccagggtatgggtttgccaaaagtgacagtaaaagttttgtggcgattcttaaacatttcatccgcaagatacaacatagcgatgttaaacttgatacccaatgccttgcaaatatttgccaggttgtagaagaaatcagaattcctaccgccgaaatgcacgggtattacatcacgttttgcttgtatgctctttactacaaatgtctttttccattccaggtcacgaatgactccattctgacgacgcgaacacagtccggcagggaacattatcagctggtcatccgactgaaatccggcttccaccattttcgggaagtcttttgcctgtttgccggttttattaataggtatgcaaaggggagccaatccgcgtagattcatcaacaaatcattcaccaggtatttcactttcccgtcatagtgctttcccaacacataaccaagcgcaacaccgtcctgtccgcctaacggatgattggacacaaaagtatacaatccatccttaggcaaattctcaatgccttttacgtccactttcgcatccaaaaagcccatacatgcctccagaaagtccacacccaatctatccttcgactcattcaggaatacattaatttcatcctgatgaacaattttcttcagataagaaaccacgaatttagggatgtacttataatgcttcggagcctttgtccgaagtatcttatcgacatcaatcaaaaataaagagtcatcagtcattcttttcaaataaaaatgatggcacaaaattaacggttcttttttattaatcgcaataatttggtagaaaatgcaggatttaagttcagaagataaaaaaacaccacccaaaaactatcaaaaacaacctaaaaactatccgcggatagttttcgggcataaaaacgtcggatttccccctatcgggtttcagaaattcacgtaaacttgcaacatcgaaaataacaaacgaatattcacctttaaaaagcaacacatatgaaaagtttaagcttcagaaaagatttagtaggagtacaagatgaattactacgcttcgcttataaactgacaactgaccgtgaagaagcaaacgatttgttgcaggagacatcattaaaagcattagataatgaagataaatatacccctgatacaaatttcaaaggatggatgtataccatcatgcgcaacatattcatcaacaactaccgcaaggtagttcgcgaccagacattcgtcgatcagacggataatctttatcatctgaatttaccacaggacggaagttcagaaagtacagaaagagcatacgacctgaaagagatgcaccgtgtagtcaacaaactccccaaagaatacagagttccgttcgccatgcacgtttcaggattcaaataccgtgagattgcggaaaaactgaacctcccgctaggcacagtaaagagccgtattttcttcacgcgccagaaattacaggaagaattgaaagacttccgctagaccttaactatataaattggtgatctcggatcacatacttctttaatacagattttagttttgataatgattaaaaggcagaaatactccggtatattctgccttttcttttattactaagattagttgcacgacacccgggtctcaacacctacaacacccgggtctcaatgggtctgacacccgggtgtcaggtatgatgagacccgggtgtcgtacaagttcctattgcatcaaaagaagtcttcactaccctattatttaaaattcacctatacagacatttttttccgttttactgccataactcccccaccagcagactactctcaaagccgcatcattttcaagcaaatagacatttaacattctgttgaaaacttctctgaaagttttttatggaaagttgtggggaattgtggggaatttcatacttttacggtcgcttattataataaggtaatgatacgttttttaggaaatattgaagccagggcggacgccaaaggaagggtgttcatacccgctaccttcaggaagcaactacaagcagcttccgaagagaggcttattatgcgtaaagacgtatttcaggactgtttgaccctgtaccccgagagcgtgtggaacgaggagttgaacgagcttcgcagcaggctgaacaaatggaacagcaaacaccaactcattttcagacagtttgtgagcgacgttgaagtggtgacacctgacagcaacggacgtatattaatccccaaacgatatttgcagatttgcagtattcatggagatatacgttttatcggcatcgacaataagatagagatctgggcgaaagagcgggcagaacagcctttcatgtcgcctgaagagttcggtgcagcattagaagaaattatgaacgatgataatagacaagatggagaaagatgaattgacataccatgtacctgtattgctgaaagaaagcgttgacgggatgaatatccaaccgggcggaacgtatgtagacgttacattcggaggagcgggacattcgcgcgagatactttcacggctcggagaaggcggacgtttattgggattcgaccaggacgaggacgccgaacggaacattgtcaacgatcctcacttcatcttcgtgcgcagcaacttccgttacctgcaaaatttcctgcgctatcacgacatcgagcaggtggatgcaatcctggccgacctcggcgtatcgtcccatcatttcgatgatagcgaacgcggcttttctttccgtttcgacggagcgctggatatgcgtatgaacaagcgtgccggaattacggcagcagacatcgtgaatacttacgaggaagaacgtcttgcaaacctcttctatctgtacggagagctgaagaatagccgcaaactggcttctgtcatcgttaaagccagaagcgggcagtacatccggactatcggtgagtttctggaaatcatcaaaccgcttttcggtcgtgaacgcgaaaagaaagagctggcaaaagtgttccaggcactgcggatcgaagtaaatcaagagatggaagcgctgaaagagatgctgcaggcagctacggaagcattaaagccgggcggcagactggtagtaatcacttatcattcattggaagaccgcatggtgaaaaacatcatgaagacgggcaacgtagaaggaaaagcagaatccgacttcttcggaaatctgcaaacgcctttccgccttgtcaataataaggtaatcgtccccgacgaggcagaaatagaacggaacccacggtcgagaagtgccaaattacgaattgcagaaaagaaataaaaagatatggaagaagaagtagtaaataagaaaacagaagagggcaagaagaaaaaccgcacctcgctgaagagtattctgggtggagacattctggctaccgattttttccgccgtcaaacgaagttgctggtacttatcatggtattcatcatcttctacattcacaatcgttatgccagtcaacagcaacaggtcgagatagaccggctgaaaaaggaattgatagacattaaatacgacgcactgacgcgcagctcggaactgatggagaagagccgccagtcacgcattgaagattatatatcgaataaggaaagcgatttgcaaacgtcaacccatcctccttaccttattaagtaagtggagagttgagaattgagagtttttaaaagacaaatactgtggcagttaataaaaagaacataatgacccgttacttcttcgtcatcctgttgatggcgttgataggaatagctattgttgtaaaagcaggcatcaccatgtttgccgaacgacaatactggcaggatgtggctgatcgtttcgtaaaagagaatgtgacggtgaaacctaatcgtggaaacattatttcttctgacggtaaactgatggccagttcgctacccgagtacagaatctatatggactttatgtccggtgagaaggacgaaaaacgcagacggaaagatcaggcacgccgggactccatcctcaatgccaatatggattccatctgtatcggacttcacaagatattcccggacaagagtgcagcccaattcaaagcacacctcaagaaaggacgccaggcaaaaagccgtaattatctgatttatccgaaacgtatttcctatatacaatataaagaggtaaagagactgcccgtattctgtttgaaccggtataaaggcggatttaaagaattagcatacaatcagcgcaagaaacctttcggttcactggctgcccgtacgctgggagatgtgtatgcagatacagccaaaggagccagaaatggtatcgaacttgctttcgacactatcctgaaaggacgggacggactgacgcaccgccaaaaagtgatgaacaaatatctgaacattgtcgatgtgccgccggttgacggttgcgatttgattagtaccatcgacgtaggcatgcaggatatttgcgagaaagcattggtagacaagctgaaagagctgaatgccagcgtaggcgtggtggtattgatggaagtagctaccggagaagtgaaagcgatcgtcaacatgatgcaaggcaaggacggcgagtattacgaaatgcgcaacaatgccatcagtgatatgcttgagccggggtccactttcaagacggcttctattatggtagctctcgaagacggcaagattactccggactatgtggtagacaccggcaacggacagatgccgatgtacggacgtgtcatgaaagaccacaactggcaccgtggaggatatgggaagctgactgttactgaaatcctgggagtttcgtccaacgtcggtacctcttatattatagatcatttctatggtagcaatccacagaagttcgtagacgggttaaaacggatgagtatcgaccaaccgctccacctacagatttcaggagaagggaagccgaatatccgtggtccgaaagaacgttattttgcaaagacgactttgccgtggatgagtatcggatacgagacacaggttcctccaatcaatattctgacgttctacaacggaatagctaataatggagtcagtgtacgtccgaaatttgtcaaagctgccgtgaaagacggggaagtcgtgaaagaatatccgacagaggttatcaatcctaagatttgttcggataagactttgacacaaattcgtgaaatactgcggaaagtggttggtgagggacttgccaagcctgcagggagtaagcagttccacgtttcaggcaaaacgggaacggcgcagatttcacagggagcagccggatacaaaacgggaagaacgaattacctggttagtttctgcggatattttccgtcagaggcacctaaatatagtatgattgtctctatccagaaaccgggcttgccggcttcgggaggtttgatggcaggtagtgtattcagcaagattgcagaaagagtgtatgccaaagacctgcggttgccgcttaccaatgcgattgacaccaattccgtagtcattccgaatgtaaaagccggagagatgcgcgaagctcaacgggtattggaggagctggagattaatatacaaggtaaagttgccgattcaggaaaagaagtgtgggggaatacgcacgttgctccgcaagctgtggttcttgaaagccggagcaatatgcagaactttgtgccgagcgtgataggtatgggagcgaaagacgctgtctacttgttggaaagcaaaggattgaaagtcaatctggtcggggtaggcaaagtgaaaagccagtcgatagccaatggaaccatcgtaaagaagggacaaacggtgacgctgacgctaaagtaaaaaataaagattaaaaattaaatagagtgatgttattaaaggagttactgaaagcgatccaaccggtagaggtagccggagattcagacatagaaatcaccggagtcaatattgactcccgtctagtggaagccggccaactgttcatggcaatgcgcggcacacaagccgacggccacgcctacatacctgctgccatagcgaaaggagcgactgctatcctctgcgaggatatgccggaagaacctgttgcggggatcacttatatacaagtcaaagacagtgaagatgcagtaggaaagattgctactactttctacggcgaccccacttccaagatggaactggttggtgttaccggaacgaacggaaaaacaacaatcgccaccttattatataatacattccgttatttcggatataaggtaggattgatttctaccgtttgcaattatatcgacgacgagccgatcccgacagagcataccacgcccgatcctatcacgttgaaccgtctattgggacgaatggcggatgaaggatgcaaatatgttttcatggaagtcagttcacactccattgcacagaaacgtatcagtggattaaagtatgcaggagggatctttaccaatctgacccgcgaccatctcgactatcataaaacagtagagaattatctgaaagcaaagaagaagttctttgacgatctgccgaaaagcgcattcagcctgactaatctggacgataagaacggactggtaatgacacagaatacacgttctaaggtttatacttattcattgagaagcctttgtgactttaaagggcgggtattggagtctcattttgaaggaatgttgctcgacttcaacaaccatgaattggcagttcagtttatcggtaagttcaatgcttccaatttgctggcagtattcggggcagccgttctgttgggcaagaaagaagaagaggtgcttgtggcccttagcacgcttcatccggtagccggacgtttcgatgcggtccgttctccacagggagttacagcgattgtagattatgcgcatactccggatgctcttattaatgtattgaatgccatacatggagtacttgaaggaaaaggaaaagtgattacagtagtgggtgccggtggcaaccgtgacaagggcaaacgtcccatcatggcaaaggaagctgctaaagccagcgaccgcgtcatcatcacttcagacaatccgcgcttcgaagagccgcaagacatcatcaacgatatgcttgccggactggatgcggaggatatgaagaaaacgctaagcattgccgaccgcaaagaagcgattcgcacggcttgcatgctggcagaaaaaggagatgtgattctcgttgccggaaaaggacacgagaattaccaggagataaaaggagtaaaacatcattttgacgataaagaagtactcaaagaaatttttaaataatgaatagattgtgctaatatgccgactggttccggtattcatccggcagaagcgacatagcaacacatcaataaattggcaaattatttatgttatattatctatttgaatggctgcaaaagctcaattttccaggagcgggaatgttcggatatacttcattccgtgctttgatggcggtgatcctcgcgttacttatttcaagtatctggggagataagttcatcaacctactcaaaaggaaacaaatcacagaaacgcagcgtgatgctaaaacggacccgttcggcgtcaacaaagtaggcgtgccgagcatgggaggtgttatcatcattgtagccatcctgatcccttgtctgttgctaggcaaactgcataatatatatatgatattgatgctgataaccaccgtatggttgggatcgctcggctttgcagacgactatatcaagatctttaaaaaagacaaagaaggtttgcatggcaagttcaagattattggtcaggtcggtttgggtttaattgtcggaatgactttgtatctaagcccggacgtagtgatccgtgagaatatcgaagttcataatccgggacaggagatggaagtgatacacggaaccaatgatttgaaatcgacccagacaacgattccttttttcaagagcaataaccttgattatgccgatttggtttctttcatgggcgagcatgcgcaaacagccggatggattttgttcgtcatcgtcacaatcatcgtggttaccgccgtatcaaacggtgccaacctgaatgacggtatggacggaatggcggccggaaactcggccattatcggcgcaacgctggggatattggcgtatgtatcgtcacatatcgagttcgcaggctatctgaatatcatgtatattccgggttcggaagaactggtaatctatatctgtgctttcatcggtgcgcttatcggtttcttatggtacaatgcttatccggcacaagtatttatgggagacacaggcagcctcaccattggcggtatcatcgcagtgttcgccatcatcatccacaaagagttgctgataccgattctttgcggtgtatttctggtagagaatctgtcggtaatcctgcaacgggcttattataaggcaggaaagcggaaaggtgtaaagcagcgtttgttcaagcgcacaccgattcacgatcatttccgtacttcgatgagtctgattgaaccgggctgtacggtgaaattcaccaagcccgaccagctgttccacgaatcaaagattaccgtccgtttctggattgtaacgattgtattggcggcaataacaattataacattaaagattagataaaatgaaggcacggattacatagattaacacggttttaactgtataatcccttaaaaccgtgaaatccgcgtcatccgtaccttcattaaaaatatagagagcattaacccgattattaacttttaaaagatgtgcgcagctaatagataaatcaatcgattagaaaacaagggcacattattgtagatgaaaagaattgtaattttaggagctggcgaaagcggcgcaggtgcagccgtactcgcaaaagtaaaaggatttgagacgtttgtttcggacatgtccgccatcaaggacaaatataaggaacttctcgacagccatcatattgcctgggaagaaggacaccataccgaagagctcattctgaatgccgacgaggttatcaaaagccccggtatcccgaatgatgccccaatcatcctgaaactgaaagctcaaggcacaccggtgatctccgagattgagtttgccggacgctatactgatgccaaaatgatctgtattacaggttctaacggaaagactacaacaacttccctgatctaccacattttcaaaagcgcaggtctgaacgtaggtttggcaggcaacatcggcaaaagtcttgctttgcaggtagccgaagattaccatgattattatattatcgaacttagctctttccagctggataatatgtataacttccgtgcgaacatcgccgtattgatgaacatcactccggaccatcttgatcgctacgaccactgtatgcagaattacatcgacgctaaattccgcattacccaaaaccaaaccccggacgatgctttcatcttctggaatgacgacccgatcatcagacaagaactggcgaaacatggtctgaaagctcacctgtatccttttgccgctgtaaaagaagacggagcgatcgcatacgtagaagaccacgaagtaaaaatcaccgaaccgattgccttcaacatggagcaggaagaactggctctgacagggcaacataacctatataactctttagccgccggtatctcggcaaaccttgccggcatcgccaaagaaaacatccgaaaagccctctccgacttcaagggagtagagcatcggttggaaaaggtggcacgtgtccgcggaattgatttcatcaacgactctaaagcaacgaatgtcaactcctgctggtatgccctgcaaagcatgactaccaaaacggtattgatcctcggtggtaaagataaaggcaacgactatactgaaattgaagaccttgtacgtgaaaagtgttcggcactggtatacctgggacttcacaacgaaaaacttcacgaattcttcgaccgtttcggcctgcccgtagcagacgtacaaaccggaatgaaggatgccgtagaagcagcctacaaactggcaaagaaaggtgaaacggtattattaagcccttgctgcgcctctttcgacctcttcaagagctatgaagaccgtggcgaccagtttaaggaatgtgtccgcgccctttaatttctaattattaatttttaattgctataagattggatttattaaagaacatattcaaaggtgacaaggtaatctggattatcttcctctgtctctgcctcatctctattatcgaggtgttctcggcagcgtcgacactgacttacaaaagtggcgaccattggggaccgattacacaacactccatcatcctgatggtaggtgctgtggtagtagtgtttctgcataatgttccctacaaatggttccaggtatttccggtctttctgtatccgatttccctggttctattggcatttgtcacgctgatgggtatcatcacaggggaccgtgtcaacggggcagcccgctggatgacctttatgggattacagttccagccttcggaattggcaaagatggcggttatcattgccgtctcattcatcctgtccaaaaggcaggacgaatacggagccaacccgaacgccttcaaatatatcatgatcctcaccggactggtattcctgcttatcgcaccggaaaacctttcgacagccatgctgcttttcggagtagtatgcatgatgatgtttatcggccgggtgtcagcaaaaaagctatttggaatgttgggaatattggcacttgtgggcggtgttgccgtaggtatactgatggctattcccgccaaaacgctgcataacactccgggacttcaccgtttcgaaacgtggcagaatcgtgtttccggcttctttgagaaggaggaagtgccggctgccaaatttgatattgacaaagatgcacaggtggcgcatgcacgcatcgccattgctaccagccacgtagtcggcaaaggtccgggaaactcgatacaacgtgacttccttagtcaggcattctccgattttatctttgcgattgtgattgaagaaatgggattaatcggaggaatatttgtggtattcctctatttatggctgctgatgcgagccggacgaatcgcccagaaatgcgagcgaaccttccccgcctttctcgttatgggcattgcgttgctactggtatcgcaagcaatattgaatatgatggttgccgtcggattattccccgtcaccggccagcccctgcctttggtcagcaaaggaggtacaagtacgttaatcaactgcgcttatatcggtatgatattaagtgtaagccgatataccgcccatctggaagaacaaaaagcgcacgatgcacagctccaactgcaattagaggcagatgcagctgcaaattccgaggcacagactgccgccgaaccgacagcacagattctgaacagcgatgccaagtttgaagatgagcatgatattgataaacggtaagtgatgaacggtgagtggtgaacgaaaaacgttgaacaacggatagaaaaaagaattaggatggaaaaagaacttagaattattatcagtggtggaggaacaggaggacatatctttcctgccgtctctatcgcaaacgctataatagagctacgccccgacgcagaaattctctttgtaggtgctgaaggacgtatggaaatgcaacgggttcccgatgcaggctaccgtattatcgggcttccgattgccggattcgaccgcaaacgtttatggaaaaatgtatctgtattgattaaactgatgcgcagccagtggaaagcacgcaaagttatcaaagacttccgcccacaagtggcggtaggcgtaggcggatatgcaagcggacctacattgaagactgccggaatgatgggagtaccgacattaatccaggaacaaaactcttatgccggagtgaccaataagctcctggcacagaaagcaaaagtgatttgtgtagcttatgacggaatggaaaagttcttccctgccgacaagattattatgacggggaatcctgtccgccaaaacctgacaaaggatatgccgtctaaagaagaagcattgcgctccttcaacttacagcccggcaaaaaaacgattctgattgtaggcggcagtctaggtgcacgtaccatcaacaatacgctgacagccggactggcaaccatcaaagaaaacacggacgtgcaattcatctggcaaacgggcaaatactactacccgcaagtgaaagaagccgtgaaagctgcaggtacacttccgaacttatatgtaacggatttcatcaaagacatggcagccgcatacgcagcagccgatcttgtgatttcccgtgcaggggcaggttccatttcagagttctgcctgttacataaacctgttattttagtgccttcgcccaatgtagcggaagaccatcagactaagaatgccttagcattggtgaacaaacaggcagcgatctacgtcaaagacagtgaagcagaaacaaccttgatggatgtagcattatccaccgtcaatgacgaacagaaactgaaagaactgacagagaatatcgccaagctggctttgcccgattctgcgagaatcatcgcacaggaggttatcaaactggcggaagcaaagagctgataaacagaagcaaaaaacagataaatagattatcggattgcacacaggttgaagtagcagtatagctccgggatcaaacggcgtaatccgtactaaaataaaaaacagaagaaatgaatatagaaacgataaaatcagtctatttcgtaggtgccggcggcatcggtatgagtgcacttgtacgctacttcctcttcaaaggcaaggtagtggccggatatgaccgtacccctactccattgactgaaaccctgatcgccgaaggcgcacaaatacattatgaagaaaacgtcgacctgattcccgaagcctgcaaagacaaggaaagcacgttagtcatatacacgcccgccgttccgcaggaacatgaagaaatcgtttatttccgcaacaacggattcgaaatacagaaacgcgcccaagtattgggaacaattacccattcgagcaaaggtctgtgcgtggcaggcactcacggtaaaacaaccacatcgacgatgacagcccatttgctccatcaatcgcacgtggaatgtaccgcttttctcggaggaatctcgaagaactacggcaccaacctgctactctctcaaacaagcccttacacggtgattgaagcagatgagttcgaccgttctttccactggctgtcgccctatatgaccgtaattacatctaccgaccccgatcatttggacatctacggcacagaacaagcctacctggaaagtttcgagcattataccacgcttatccaaccgggtggcgcactgattatccgcaaaggcatctccctgcaacccaaagtgcagccgggcgttcgtgtctatacttactcacgtgacgaaggcgacttccatgcagaaaacatccgcatcggaaacggagaaatattcatcgactttgttgccccggacacccgtatcaacgatattcaactgggaattccggttagcatcaacatagaaaacggcgtagccgccatggcattggcacaccttaacggggtgaccgatgaagaaataaaaaggggtatggcaagtttccgcggagtagaccgccggttcgacttcaagatcaagaacgaccgtatcgtctttttgagtgactacgcccaccacccctctgaaatcaaacagagcgtgttgtctatgcgcgaactttacaaagacaagaagattacagccatcttccagccgcatctctatacccgcacccgcgacttctatcaagattttgccgatagcctgtcgctactcgacgaagtgattctggtagacatctatccggcacgtgaagcaccgattccgggcgtcaccagcaagctgatttatgacaatctccgtccgggcattgaaaaaagtatgtgcaaaaaggaagatatactgaacattctgaaagataaaaacattgaagtattaatcactttgggggctggagacattgacaactatgtccctgaaataaaggaactattagaaacaaaaaattaagaatgaataatgaataatgaagaatctctatccagcgtattgatgcgcagcaattcttcattcttcattcttaattcttcattaataaaaaaactatggtaaagagaatccttctatccatcgtcatgctggtgcttatagcctacctcgccgtagctatcaccgcattcaaccgcaagcctgccgaccagacctgccgtgacatggaattggttatcaaggataccgcatacgccggcttcatcaccaaagaagagctgaaaggtatccttcagcacaaagggatctaccccatcgggaagaagatggagcgcatctctaccaagtcactggaacgggaactaagcaaacatccgttgattgacgaagccgagtgttacaaaacacccagcggcaaagtatgcgtggaagtgacacaacgtatccctattcttcgggtgatgagctccaacggtcagaattactaccttgacaacaaaggaaccgtcatgccaccggatgcaaaatgcgtcgctcaccgggtaattgccaccggaaacgtagaaaagtcgtttgcaatgaaggatttatataagtttggtgtatttttgcataataataaattctgggacgcccagatagaacagattcatgtgttgcccgaccagaacatcgaattggtgccgcgtgtgggagaccatctcgtctatctcggaaaactggaaaactttgaagataaactggcacgtttgaaggagttctacaagaaaggactcaaccgggtaggctggaacaaatattcgcgtatcaacctcgaattcaacaaccagattatctgcaccaaacgagaatagataataaatgatagttgataattgatagttgacagacgaggagtgaacaatcttttttcaatcgtaaattgtaaatcgtaaaatcgtaaataaatatatatggcaacaacagaatttatcgccgctattgaacttggttcatcgaagataaccggtgtggccggaagaaagaacagtgacggaagtatgcaggtattagcgtatgcccaggaagactcttctacgtttattcgtaaaggagttattttcaatctggacaaaacagcgcaaagcctgacctcgatcatcaacagactggaaggtgagttgaaaaactcaattgccaaggtatatgtaggcatcggcggacaatcactccgcacagtccgcaatgtagtaagccgcgacctggaagaagaagccatcatatccgaagaacttgtaagcgctatcggtgatgaaaacattgccatcccggtggttgatatggatatactggacgtagctccgcaagaatacaaggtgggcaataatctgcaagccaacccggtaggtctggtaggaagccacatcgaaggacgtttcctcaacatcgttgcccgtgcttccgtacgcaagaatctggagcattgcttccagcaggcaaaaatcgacattgccgaccaactgatcgccccgctagtaacagccaatgccgtactgacagaaagcgaacgccgttcgggttgtgcattgatcgacttcggagcagatacgactaccatctctgtatataagaataacatccttcgcttcctcaccgtattacctttgggaggcaacagcatcacgcgtgacatcaccaccctgcaaatggaggaggaagaagccgaacgcctgaaaaaagcctacggtgacgccctctacgaagaagaccccgaacaagaggaagaagctacctgcaaactggaggatgacaaccgtatcatcaaagtggcagaccttaataatatcatcgaagcccgtgccgaagaaatcgttgccaacgtatggaaccagattcagctatccggctacgaagacaaactgctggcaggacttatcctaacaggaggagccgccaacctgaagaacttggacgaaaccttgcgcaaacgcagcaagatagaaaagatacggatggcgaaacttccacgcaatacggtccatgcccccaacaatatactaaaaaaagacggttcacagaacacattgttcggtctactgtttgaagggaaccaaaactgttgcctgactgaaaccgccccgcaagctgctgctcctgtaccgccagtctccaaaccggagccggaagtgcataggaccgcagacatatttgaagacgaccaggagctgaaggaacaggcccgcctcgcccgcctcaagaaagaggaagaagagcgtgaagccaagttagctgctaaagaagcggaaaaacttcgcaagcaaaaggaaaaggaagagaaagaaagacggaaaagagaagccggtccgagctggattcagcgcaagatcgactcgttgacgaaagaaatcttctccgacgacgatatgaagtgagttatgatttatgaattatgatttatgagttggctgcgcgctatatcataaatcataacttataaatcaagattcaaaaatcagagttcagaaaccagaaatcataaatcagaaatcatattattatggacgagatagtacaattcgatttcccgacagattcaccgaagatcatcaaagtgattggtgtaggtggtggtggtggtaacgctgtaaaccacatgtaccgggaaggcatccatgatgtaacgttcgttctttgcaacacggacaaccaggcattggccgaatcacctgtcccggtgaaactgcaactgggccgtagcatcacgcaagggcttggagccggcaaccgtcccgaacgggcacgcgacgccgctgaagaaagtatagaagatatcaaggcacaactgaacgacggcaccaagatggtattcatcaccgccggaatgggaggaggaaccggaacaggagctgccccggtcattgcccgcattgcgaaggaaatggatattctgactgtcggtatcgtcaccatcccctttatcttcgaaggagaaaagaaaatcatccaggcactggacggcgtcgaacgtatcgcccagcacgttgatgccctattggttatcaacaacgaacgcctgcgcgaaatatacgccgaccttacctttatgaatgccttcggcaaggccgatgacactctttccatcgctgccaagagcattgccgagattatcaccatgcgtggtacggtcaacctcgactttgccgatgtgaaaaccatcctgaaagatggcggagtagcgatcatgagtaccggattcggcgaaggagaaaatcgtgtgacgaaagcaatcgacgatgccctgcattctccgctgctcaacaacaacgatattttcaatgccaagaaggttatgttgaacgtttctttctgcccgtcatccgaactgatgatggaggagatgaacgagatacacgagttcatgagcaagttccgcgaaggagtggaagtgatctggggtgttgccatcgacaactcactggataccaaagtaaagatcaccgtattggcaaccggattcggtgtagaagacgtccccggaatggacagcctgcatgctgcacgcagccaggaagaggaagaacgccaactgcaactggaagaggaaaaagagaagaacaaagaacgtatccgcaaggcatacggcgaaagtgccagcaatatcggaagcaagagcctccgcaaacgccgccacatctatcttttcaacacggaagatttggacaacgacgatatcatcgccatggtagaagattctcccacgtatatgcgtgataagacgactcttactaaaatccggacaaaggctgcattggaagaagaagtggcaacagaagaagctacggatgataacggcgtaattacattctaaacaaagagcttaagaacgaaaattatagtcccacagcatcaggcttcagatctaatttttaatcttcaatttataattataatagtatggatttattcgatcaagtcagcgaagacattaaaaacgcaatgaaggcgaaagataaagtagccctcgaaactttgagaaatataaagaagttcttcctcgaagctaagacagctccgggagctaacgatatattgacagatgatgccgctttgaagattatccagaaacttgtaaaacaaggaaaagattctgctgaaatctatatcggacagggtcgtcaggacttggctgacgtagaattgagtcaggtagccgttatggaaaaatacctgccgaaacagatgagtgccgaagaactggaagctgctttgaaggaaatcatcgcagagacaggtgctacgagcggtaaagacatgggtaaggtcatgggagttgcctccaagaagct

SEQ ID NO: 8280 - DNA, 2888 bp, Unknown
  gut microbiota DNA sequence
tgaaacacagaatgttatttataaatcgtatatcatgaaaaaagaattttttggtttgctttgtggatgtactctgcttccggcatttcttcatgcgcagacagagcgtcctaatattgtgattgtattggccgacgatttgggttggggtgatgtaggatttcatggtagtgaaatcaagactccctgtttggatgctctggtgggcgaaggagtggaactcgaacgcttttacacttctcccatcagtacgcctacccgtgcggggctgatgacgggacgttacccgaaccggtttggtgtccgttcggctgttattccgccctggcgtgaggacggactggatgagaatgaagaaacgatggccgatatgctggcacgtaacggatataagaacagagccattattggtaagtggcatctggggcataccaagaaagtgcattatccgatgaataggggcttttcgcatttctatggtcatctgaacggtgcgatagattatttcgacctgacgcgtgaaggtgaactggactggcacaacgactgggaaacctgccacgacaaaggatattctaccgaattgataaccaaagaagccatccgctgtatcgatgcatacgagaaagaaggtccgtttatgttgtatgtggcctataacgcacctcatacccctttgcaggcacaggaaaaagatataaaactctatactgacaatttcgacagcctgacaccgaaagaacagaagaaagtgacttatagtgcaatggtttcctgtatggacaggggaatcggtgctattgtagatgccttgaagaagaaaggaattatggacaacactttctttatcttctttagtgataacggcactgccggtgttccgggatcttcatcaggacctttgcgtggacataaatttgacgagtgggatggaggggtacatgcaccggctgttctttattggaagaaagcagagaaacaatataagaacttgagttcacaggtgacaggttttgttgatcttgttcccacattgaaagatttggtaggagatcacagccgtccgaaacgtgaatatgacggtatcagcatcctccctgtattaaacggtaaaaaggcctgtatcgaccgcgatttttatctgggacacggagcagtagtcaataaagactataaactgataagaaaaggtatgaaaccgggactggatttgaaacaggacttcctggttgattataaaacagatccttacgaaaagaaaaatgccagcgcaggaaacgagaaaattgtgaaagctttgtatgaggttgccctgaaatatgacacgatcactccttgtataccggaagtaccttacggtaaaggtcgtgacggattcaaagctcctaaagaatggaaagtagtacgttgaatctgttaaccctatgaattgaaaataatacaagatggaaaaatcaatgattagtttatgcctcctaggcggattggcgataggaaacgggtttgcccaaactccttcaaagcctaatatattattaatcatagccgatgactgctcctattacgatataggctgtttcggagcagtcaacaacaagactccccatatagatgcattggctcgacaggggataaagttcaacagtgcgtataattctgtttcgatgagtacgcctacccggcattgtgtttatacaggtatgtatccgatgcatcacggcggttacgccaaccatagctcggtcaatgccgatgtaaaatctcttcccacttatctgggaaatctgggttatcgggttggattggccgggaaatggcatatcaaacctttggctaacttccccttcgaaaaagtaccgggatttcctgaaggatgtacaagtacaaacactgactatcataccaaaggtatcgagaagtttatggaacgtgatgcttcccaacctttctgccttgtcttggcatctattaattcgcacgctccctggacaggtggtgacgcttccgttttcgaccggaagaaacttcagttgccgccacagtttatcgacacggaagtaacacgtgaatactatgccagatatttggcagaagtcggcttgctcgatcagcaggtgggtgacgctatgcagattctgaaagaaaagaatctgctgcagaacactcttgtcatttttatatccgagcagggtacgcaatttgccggagccaaatggaccaattggagtgccggtgtcaagtcggcgatggtggcttcctggccgggtgtcattaaacccggtacggagacttccgctattgtgcaatatgaagaccttcttcctacatttatcgatgttgcaggcggaaaggtgcctgacgtaatagatggaaagagtctggtagatgtatttcaagggaaaacaaagacacaccataagtatgcttatcatgttcacaacaatgttccggaaggtccggcatatccaatccgttctatttcagacggacgctatcgtctaatctggaacttgactccgaaggaaacatacgtagaaaagcatattgaaaaggcagaatggtatctctcgtggaaagcacaggacacggatcaggcacataaaatcatgaaccgctataagaatcgtcccgagttcgaattatatgatatcaagaaagatccgtttgaaatgaataatctggcggatgtgaagaaatatagtaagaagaaggcagaactgacgatggaactgcaaaaatggatgaaacagcaaaatgatactggagctgataaagaccggccgcgtgctcctaagaataggcagaagaaagcaaccaatgtataatattcgtaatgctaccgcttgttgctctctgaaagagatttatcttttttatttctcatttct

SEQ ID NO: 8281 - DNA, 10225 bp, Unknown
  gut microbiota DNA sequence
ttcagtgaaagaagcaatgacgcaactgaagaataaaagcggatattctttcgtatataaagtgggagatctggatacaaagaaaattgtgagtgtgaaggcaaagcagttgaatgaggctatcgatcagatattgtacgggcaagatgttgtttatgaggtaaaaggtaagaatattgttgtccaaaaagggcaacggcagaatacctctaaagacactaaaaaacgtaaaatcacaggtgtggtgaatgatgccaatggtgaaccgatcatcggtgctaccatcaaggaaaaaggaacggctaacggaaccgcatctgatttgaatgcgaagttctcgttggaagtatcaccgggagccgtattagagatttcctatattggttatcagacacaggaagtaaaagtgggagaccggacctctttatccgtgaccttggctgagaatcagcaaattttagatgaggtggtagtggtgggctatggtacgacttcccgcaaaaatctgactacttctattgctacggtaaaaacagaaaaaatatcgaaagcagctaccagtaatatttccggaatgttgttggggcgtgctgccggtttgcaggcaaccgtatccagtccccagccggggggaggcatcaatatctccattcgtggaggtggtacaccgatttatgtggtagatggagtggttatgcctagcggctcttttgaagtcggtacggggagcacatcacttccttcctccgtcaaccgtgcaggattggcaggattaaatcccaacgatattgaatctattgaaatcctgaaagatgcttctgccgccatttatggtatcggagctgccgatggtgttattttggtgactaccaaaaagggaaaagaaggaaaaccgaccatagtgtatgaaggaagttattccatacagaaacattatccttatctggaggtattgagtggtcccgaattgatgaacatggtcaatgtttttagtaaggagaattatttatatgacaaaggtcagtatccttatggaaataccgcttatgatgataagtggacacctatctttacaccgacacaaatagccaatgctccgactacggactggttggacaaagtgctgaaaacaggtgcggtgaccaatcataatctgacgattagcggtggttctgaaaagtttaaatattatctgggtgttaactactataaagaagatgctaccgttcataattcggatatggagcgctactctttgcgtacaaatatcacctcccaactgactaactttttgaaactgacaacaatcgtcaatttgaatcagaataattacacgaactctactgttggcggggatgttgggaacttaggagatcagggagccggagcacttttcggagcaattttctatccttcctatcttcccatatacgatgccgaagggaaatataatgtatttagccggacgcctaaccctgtttccatgcatgatattaatgataagtccgagcaaagtggttattacatgaatttctcattggatgttgatatcataaagaatatgctttcggcaaaagtgttgtatggattgaacaaggaaaatacctctcgtgattcatacataccttctgatgtttactacgcattgcaacgtaaatccagaggaaacttaggatatggaaaaaggcaacaaagcactctcgaaggtacattgacatttcaacataagtttggcgagctgttggatatgaatctgatggccggtatgggacgttatctcgatagtggcgatggttcggatatatcatacgaaaatgcgaatgatcatatacagggaagcagtgtaggcatggcagacggtcctttctatccgacttcttataaatataaaaatgaaaagaggtcacagtttgtcagaggaaatttcgacttattgggtcgctatgtagtatctgcttcattgcgccgtgacggtacggataaattctttcccagtaagaaatatgctctctttccatctgtttctctagcatggaaaatgaacgaagaatcatttataaagaatatctcctggattaatatgttgaaactaagagccagttatggtgaaactggtagtgacaatttaggtacaacactatatggtattgtaacaactacccgtgaagatgttcagttcaataataattcagttacctatattccttacatattgtccggtgccaactatgaagatgtaacctggcaaaagacggttatgaaaaatatcggattggatttttccgttcttagagatagaatctggggtagtgtagatgtattccgtaatgacgtaacccatttgttggggacagcaccgactgaattattgggaatgcacggaacacgtcctatcaatggaggacattataaacgtaccggagtagatgtgagtttgaattcgctgaatcttcaaacacatgatttcaaatggacctctcaaattacactgtcccattataacgcggtatggatagaacgtatgcccaactatgattatcaaaaatatcagaaaaggaaaaatgaaccgatgaatgcattctattattataaaacgaccggtatcatcaatgtggataagagtaatatgcccgaatcgcaacgttcgttaggtcctgctgcttgtatgccgggatatcctattgttaaagataaaaatggtgatggaatcattgatgtgaatgactcttatatggataatacgttacctaaattatattttggtttcgggaatacatttacatggaagaactttgatttggatatattcatgtatggtcaattgggagtaaagaaatggaatgatgcatatggcaatagtatagatgtcggaggtctctccagaggagtggatgcgcacaatgttggtatctattcttataatatttggaatacccagacaaacacgaacggacgcttcccgggtatcgcaatcagtaaatcagtggctttacccgaaaatctgggctttgattatacaagagaaaatgcctcttatatacgtgtaagaaacatcacactgggatataatctgggtcccaaagagttatctgtatttaaaggatatattagaggaatacgtgtgtttgtcgattttcagaatcctttgacctttaccaaatacaaaggatatgaccctgaaatcaacacttcctcttctaatttgaccggagggcaatatcctcaaatgagagtttattcaataggtgcaaaattaaccttctaaacttcaagctatgaaatctaacaaattatgtcgtatgaaaaagaagatttttttaccgatgcttgtttccttgcaactattattcggtagttgtgagaataattttgatccttatatttatggagctttgttgcagggagaatatccttctacagagcaggagtatgtttcctatatgatgatttgctacttgccatacactacggtttggacgtatgatatgggttcaggcggtttgcagcacggtattcatatacagtcgggaggaacggtacgtatgtttgattccacttctgatatatgtgcatctgctaccacagtaggtgcagactgggaacgctttactaaaggagattacagtaattgcttttattactggcgtggaaatgtagatgatggcagtaacctcaaccatttcccgaaaacagctcaaataacccgtatgactgaaatcattggaactttggagaaagctcctctgactgctcttacagaagaaaaaaagaataatctgcttggagaagcgcgtctgtgccgtggattgatgatgtattttctgttacatgtttacggtcctgtaccggtcatcctggaccctgaaaaagtaattgatccggaagcgttatcgaataccgtgcgtccttctttggatgaaatggcccagtggattacggacgacttggaatttgctgcaaagaatgcgcccgaaacagctcccgatttgggacgctatacgcgtgactatgcccgtttctgcctgatgaaacactgtctgaacgagggagaacacatggaaggttattatcagagagcgatggatatgtataatgaactcaatacaggtaaatatgatttgtttagaactggaagtaccccatacgttgacctgttcaagaatgccaataaattcaataaagaaatcattatggctgtcagttgtagcccggctgccgatggtaacccgaaacatggaaatgcgaatcctttcctgatgtgggctttaccttccgatgtggcaaaaggggatcctttcccaatgggaggcggatggtttcaggctttcagtatggataagaaatactatgatgctttcgaaagtaacgacggtcgtttgaaaacaattgtgactagttataaagacaagaatggtgttatcattaataaagacaatctgggggtgagatggaatggatatattatgaataaatttccgcaggaaaccatgacaactttccaggggaccgatattcctttggcaagatgggccgatgtattattgatgtatgcagaggcagaagtacgcaaaacaggaaccgttccttctgtggctgctataaatgcagtaaatcaagtaaggaacagagccggattggcaaatttgccggctgtggcaaccaataccaaagatgcttttctggatgctatcttgatcgaacggggacatgaactcttttatgaaggtaatcgtaaaattgacttgatccgttttaataaatatgcgcaggaaatgtataaggcgaagggagtaatgccgacgcatcagtacatgccgattcctaattatgcagtcgaacaggcggtttcttatggaaaaaagctgaagcagacttgggaacgtccgggttgggcggaagataagagcaaagcgcagcaaaatataaattaaacctattaactgaatataaagatatgaaacgtatgagttactatataattggtctattattgtctttaatgagttgggcatgctcggatgatgtagaaacaggcagagaagaaattccggtggaaacggatggcggatatttatttgcccacatgacgaatgctaattatggaaagctgtattatgcagcttcccgggatggtgtaaattgggagacgctgaataaaggtcggataatcaatagtgcttacattgggcatcctgatatttgtcagggacatgatggggctttttatatgatagcagtcaatccgttggctttgtggcggtcggaagatttggtgacatggacgtctgccccgttggatgaaatgatttttaatcgtagtaatgcgcagggattttatactacttattattggggagcacccaagatgttttatgacaaggacagcggacaatatattataagctggcatgcctgcaacgatccggataaggatgactgggacagtatgcgtactctctatgtgttgacaaaagattttgagacgtatacagaaccgcagaaactgttcaacttcactggtacagatgagaacatggctattattgatgccattatccggaaggtaaacggtgtttattatgcaatcttgaaagatgaacgcgatccggctgttgctccggaaaccgggaaaacagtccgtattgccacctcttccaatctgaccggtccttacaccaatccgggagcacccgtcactccgaatgatatgatgcgcgaagcacctatttttatcgaacggcccaatcatagcggttggttcatttatgcggagtcttatgccgccaaaccttatggctatcatttgtttcagtcgacctctatggacggaccgtggaaagagcgtaccttctccgggcctaatgtaaaggatggcacggacagaccgggtgcacgacacggctgcattgtgaaggtgaacgaaacggtttatcaggctttgttgaaagcatataaaaaataaatgtataatcttaatatgactgtattatgaaatattatatatatacgatttttctgcttctgttggcggcatcctgtagcgatgacgtacagaaatgggataattggccggaatggaaacttgcctctcctctttccgtaggggggaatgtgttggatgaagaaatttactccaattttcaggggaagaagcttcatttggaaaagggacaggaaatcgaattttcgggaaccgacggtatagaatcaatcctctcaccggattactttgaatacttgtccggaaataaagctcgttttaaaggagagacaggcgattatagtgtgctttatgatcccgttaatgaacttctgtatgtagaaaaagccggtgcaacttatccggaaggattatggttctgtggtgctaactgggggcatcctcaagcgggagtggttactacaagtggctggagtatggacggagccaacaatgtgctttattgttataaaagtgctgacaacgtttttcagctcactgtatatctggctaataacttctcattcaagttcttcaaacatagaggttggggagaaggtgataatgagattaccactttaccggaagacaatataacacttaccaccccattcctggttgcaggaaagagtgggggagattttatccctggaccgctgtttcaacccggagtatatcttattacgcttgatttgaacaataatacttgtgctttcgaagcaaaagatgaaaatattcaggagcaaaccttccttgttaacgggcatgaaatgggcatattagaagaggcttcgtcttacctgggtattgctttggaacttcatgaaggcgatgaagtgactttcggcaattttggtgatgtgagaaagatgcttcaaccggatttctttgaagatataacaaaggataaagccatatttataggggcggacggaaactataaactgttttatgatccggtaaacaaactgatgtatttagaaaatcgttcagtaaactatccggatggtttatgggtttgcggttctaatttcgggcatcctcaagccggacgggtgactgttgccacatggaccttcaatttgccgagtgatgcattccaatgcgtgaagatatcggataatgtttttgaaacaactctttatctggttaaagatttccagtttaaattctataagcaacgtccgtggggaggtgaactggctagcaccactgttaatccttatcctataaatctattaggtaaaggctggttttatagtgatccggcaacgggtggtactggtggcggacattttaccggtgattttgtagccggaccggatttcacaccgggagtataccgtgtccggatagatctgaataagaatatatgtatgtttattgataaggtagacgaagggcagcttggagaagaattttataaaataaacggtacagagctgactcaatctaatgatcccaattatatcggtgtagagttaaatctcacgaaagggcagactgtcgattttgaaggttttagttatctggattatatgcttcaaccggaatactttacgaatgaaaacggccaatacaagtttaatgctccggatggcaagtataagatctcctataataagaatagggaacttatatatgtagagaaaacgactggtgcggaattccccgaaactgtatggatcactggggctaccttcgggcatcctagaatcagcggacttcttgctgatgacattggaaattggggatgggaaaatccgaaagattttatctgttgtgtgaagaccggggatcgtatttttgaaaccaatctatttttaaacaatgattttatgttcagattctataagaaaaaaggttggaataatgaaattacttcgtttgacgtgactattgtgtctgaaggtgatttaatagcccggggcggttattggaacggagatcaatggcaggaaacagaaaacttcggaccgggagctaatttcagagccggtatatatcatgtcaagctggatatgaatacaaatacctgcacgtttacaaagaaatactagttttgagtattatattagtatagcataacataaagaggccggttttatacaaaacacgacctctttatataaatggctatgtggttttctcttttagaaatgtcttattatatagattctaaaaataatatccatgaagaaatctttattggttttagctttattgttttcattggcatccttttcccagtctccggtcgataagtcttttcctccggaagagttgtttgctttgggttcttattattaccccgagcaatgggattcctcccaatgggaacgtgatctgaagaaaatgtcggagatggggatcaagttcacccattttgcggagttcgcttgggccatgatggagccggaagaaggaaagtatgattttgagtggctggatcgtgcagtctctttggcggagaaatatggtttgaaagtaatcatgtgtacgcctactcctacacctcctgcctggctgtcgaaaaagtaccccgatatattgattcagcgggataatggagtttccattcagcacggacggcgtcagcatgcttcctggagtagcgaccgttaccgtcgttatgtagaaaacattgtttcccgtctggcaatgcgttatggcaatcatcctgctgttatcggctggcagattgacaatgagccgggacactacggagtagtggattacagtgaaaatgcacaactaaaattccgcgtctggctacaaaagaaatacggaactatcgacaaactgaatgatacatggggaacctctttctggagtgaaacttatcaggacttcgaccaagtgcgtctccctagtcagcaggaagtacccgataagcccaatcctcatgccatgctcgacctgaaccgtttcatggcggacgaattggcgggctttgttaatatgcaggcggacatactccggcagcatattaataaagaccaatggatcactaccaacctgattcctgttttcaatccggttgacccggtacggatcgatcatacggacttcctgacctacacccgctatctggtgaccggacataatcaaggaataggtagccagggctttcgaatggggattcccgaagatcttgggttttccaatgaccagtttcgtaaccgtgtaggcaaaacattcggagtgatggaactacaacccggtcaggtgaactggggagtgtataatccacaacccctacccggcgctgtgcgtatgtgggtgtatcacgtttttgcaggtggtgggaagtttgtgtgcaattaccgtttccgtcaacctctgaaaggcagtgagcagtatcattacggcatgataatgaccgacggggtgactctttctccgggcggtgaagaatatgtacgtatcacgcaggagatgaaaaagcttcgtgccgcctacgataagaaaaaccgtatgcccaaacagctggcttcccgacgcattggactgcttttcgatatgaacaactattgggaaatggagttccagcgtcagacagaccagtggtggacgatgccgcacatacataagtattacaacctgttgaagtcctttgccgctcccgtcgatgtgatctcggagaaggaggatttttcgggttatcccttcctgattgcgccggcttatcagttgcttgataacaatttggtagaacgttggactgaatacgtgaagaatggaggacatctgattctgacctgccgtgccgggcagaaagaccgtaatgccaaattgtgggaggctcctttagctgctcccatccaccaactggccggaataaacagcctgtactatgaccatctgcctcacaatctgtatggaatggttgatttcgggggcatggaatacgcctggaacaattgggcggacgtactaactccggatgccggaacagatgtttgggctgtgtatgcggaccagttttataagggagctgcttctgtgatacaccgtaggctgggtaaaggaacggtcacctatatcggaacggataccgatgacgggaagttggagaaagaagtagtacgtcgtgtatatgaggaagccggcgtaccgactgaagatttaccatacggagtagtgaaggaatggcgggatggtttttacatcgctttgaattatacatcggacattcaggaaatagccattcccgatgaggcggagatattgatcggcagtgca

SEQ ID NO: 8282 - DNA, 4704 bp, Unknown
  gut microbiota DNA sequence
aagcgaactgcgtccgtgaatcatccggcacagtttatccgttcccaccttaccattcaaaaaaatgcggggatgcaaacctttctcttccgaatcatcggactcaccgggattctcataccaatcgtaaagtatagccattagtcgttaacgttttgatagtgaatatatttcatgtaaaaactttaagtttattatcaaaccactaccgtggttcatttaaatcacactcgttatccaattaaatcactcttgtcatttaattggaccacgaaagtgaatcaacaataactcttcgtcaaagatacgataaaaaatagagaaaaggacgataagaagccgccttcttcagtcaagtagaaatttatattttttccggagaaatacttgcaaaccgatatcatcctatagtacattcgcagtatcagcgctgaacaataaaccgattttaatcacttaaaaatagaaaaaataatgaatgcaataacattgatatggagacaggtattgaaggaactaaaattgtttcaaatgaaggaaaacaaagaagatgcagttgagaaaacagaaaaagagctacagaaaacgctaaaatgtcatgaagataaatataccattcccctgccggacactgtaccgcctactggaaaagagaaagagacagaacgaaaacaaccggtccgattaacccaagaggtacgtacattcctgcaaaaacagtatgattttcgttacaacctattgacggaagaaacggaatatcgtcctgccaacaagcgtgccgttcctttcgaacctgtaagtaagcgggaactgaacactttctgcatggaagcacacgaccagggcatatcctgctgggataaagacttgagccgttacatttattccacttgtattcctgaataccatcctttccggctttacatggaggaactgcccggctgggatgggacagacagactggaagctttggcgcagcgtgtctctgacaatcagctctggataaaaagcttccatacctggatgctgggactcaccgcccaatggttaggcatgacgggaatacatgccaacagcgtagcccccatacttgtcagcagcgagcagggacgacaaaaatccacattttgcaaggcactgatgccgccggcactgtcacgttattacatggacaacctgaaactgtctgcacaaggaaaacccgaaaggttacttgccgaaatgggacttctgaacatggatgaatttgacaaatacggaacgcagcaaatgccattattgaagaatctgatgcaaatggcaaacctgaatatctgcaaagcttatcaaaagaatttccgcaacttgccgcgcatcgcttctttcatcggtacaagcaaccgttttgacttgctcaccgatcccaccggtagccggcgattcatctgcattgaagcagaacatctgatcgattgcgaaggtatcatgcacgatcagatctatgcccaactgaaagctgaactactctccggcatccgctattggttcacaaaagaagaggaacgggaactgcaacgccacaatgctgctttttatcatccgtgtccggcagaggaagtctttcatgcctgcttccggattgctaaagataatgaagagggaagcgaacggctctcggcttcggacatattcaggagactgaagatgtataaccccgctgccatgcgtggaagtaatccggctacgttcgcgcaagttttgcttgcggcaggggtcacccgcaaacataccaaatatgggaatgtatatttggtgaaaccgatgaaagcggcataaagctccaaacagagggagggttcacccgtaaaaaactggtaaagaagtgtttacaaaggagtgaaagaggtgaaaagagaaagaggatattaagaggaaaataagctataaacagtaagattttgaatagaaaatcaggaataacttggttatctattcaaaatcttactgtttatagcctaggatcatctgcttgaagtcagtagtatatgctactttgtttccggatatttatcctactatccatttactgcccggtataaacgaaatgatcttagttgttacaaaacaacagataaacgtaaccactgcgatacatggtatagcggcaacagtgggaagcgccaatgtatctttgaacacagtcacccacagtccgagccagaatatgtgcataagatacataccatagctaagtttcgatgtttccgtcaccaacttgggagcttgcggacgtttgatacatgtaaacataaggaatgtacccgttgtgagaagcacacagttaatggtacagaaagcccatcctatttctattacaggtgtggaatggagttcgccgggtatagcctgcacatagaatgaataaatagtccatacagcaccgatcaccattaaaatagttcctataatgaaacgtttggaacggttccaggtaaggtgtacacgaatgtaatgcgccagaacaagatagcccagataaccggagaagtaccacaacatgtggtattcattccagaaacattgtccccacacttcaccgcaccaacgattgagataaggcatacaggttgacaacacgaacagccctataaagaaacgttcttctttagccgtggcttttctcaaccatggggatataattgggataaacaaataaaggcttatcagaggatacataaaccacaagtgtccggctagcgtcgggaaattcaggaatatccgcgacaagtccttcatagatgtttctccgtctatctgtctccacaacataggtagagtgctgtacagtagcatgaatatgaaaaacggtggaaggatgcgaagacaacgctggcgatagaattgccacatagactgctcttccttcatcggtgcaagcaggaaggcagagactatcatgaacagaggtactgccatacgtgaaaagccatcgtatactgatacccatagccggtctgcttcattcgctagaaaagactgcggacctgccatatcagtagatccgggagcaccatagaaattctcactggcatgaacaaggatgacgagaaagcatgcaaacacacggatgtaatctaaaaaaacaatacgtttcatttattctaagttttctagttattaatttattcttttgtgttcgggaacgcagagattctcaaccgtgccgcacccataggaatcaatgttatttcttctttatcacctttcaccgcatcttcttccggcaatacgccacacagtcctgtttcgtctatcttccattcaggaaccggacgaccgatagcttttacttctaaaggtacactggttactgtgaaaggatagttgtcagccggccaggatttacggatgaccttgaaatttttcaaaggttctttcttatccaataccaacgaataattccaggggctatccggatagatttcagtagtaggccattttttcgaatcagcacctttctgccattttgaatcaccgatagcagtctcgcgactgtctttctctacatatttctctgcaatcttaagagacaaagtcaaaggtccgtaatctacgcttacgctgtttttattaacctgccaggtacgcatagacaaagacatcggaagagtcaattccacacggtcaccattcgcccactcgcgattgatgcaaagatattttcccgctacaggagctgcacttaccttcttgccattcacccgtacttccgccttttgagtccatgaaggaatacgaagataaaatggaaaagcgaccttttcaccggtagaaacagtaaaggcaatagcttcttcaaaaggataatttgtctcttcgtgaagagtgatttccttgccgtcacccactttcactgtagctttgcaagctgcataaatagctgttgccactccgttgtcgggagttgccagtaccagatgttcggtgaagtaaggccagccctgtgcatgattgtgttggcagcaacgactgctgaaaggattcatcgaaaggaacgggccacgattgtcaatgcccggatgatgattcttcgaatcactgatggcatggttcggacaagtgatataacgcaatgctttaaaatctggcatcacggcagccggataagagttgaacgctacttcttcacagtgttcagcccacatgggatctcctgtcatgcaaagcatgatttcatcagaagccatttgttctaccaaaccgcaggtttccactccctgtcggggatcgatatatcccagacgagcattttcgtccgcaccgaacatacctccgggaacctgaccaaaagtacgccgaatcagatgatggacattataagaggctttcagcatcgctgaatctccggtctgcatataataagtggcaggttcacggaaacattgggcgatatttacattgtgccagttaggtaaggaggtggatttcgtccagtcggctgtgttacggtgaatcttctcggctaattcgagtaggaaagcatccccagtatggttgtaaagccagtagatactgatgatgttatcaccgccacgacttttctcccaataatcttccagaagttgatcatcgggaacagtcatctgccacttgaagtaattcgtcatcaggtcaatgacacgctgatcttgagaatactcataataagattgcagacaccag

SEQ ID NO: 8283 - DNA, 6815 bp, Unknown
  gut microbiota DNA sequence
ctaaaaagtttcttaatcacattactatctccaaacatatttttttctacatttgcaacggactcttccgcagaaagccttatgggtggaaaggggagagccgtttatattgagaagacgtttacaagcgtttatcttttgtgtttcagaacttcgcaatttttgacccaccggaaagatgaacagcaataaagacgtcctcctgatgtgtatctatatacatccgtgcctcactttggaaaacaaagagaggctgcgggtgttgtacatatcggcgtgggctttctgcgttgttcgttctcggtgatatggcattgcgaaggccttgaaacacagaacgaacgaaggtgagattcccacgccttttctgtatattctccattactgaacataccaatccgtccgtctgcgggaatcagggacatagtatacaggagtcatcacatggttcatgccggacagctgatcgaacaaaaacttcacgaacaagggcgcacagtcacctggttcgctactcaattatgttgtacccggcccaacgtctacaagattttcagaaaagagaatatcgacattcatctgctatggcgtatatcctgcatcctcaaccatgactttttccgcgacttatccaacgacatcaacaatagcaactccgtcaatgtatccaaataagatacatttctgtctacttgttggaactatgttttctcctgctgttatgtttctttcacatacctttgcgacatatcaacaaaactcatcagatatgaaaagacttgttttattaattgcattagttttgacttgcgccatagcaacctatgcgcaaaaaacgaccttcaaattccgtgacgcacaagcacgtgcaggtgacgcagtcacagaggtatgcgtgaaacctacagtcgtcgaggtgaaaatacttgaagataaagggcggataaaggatgaatggtcactaagcaaagaggaagtggagatcgccatgaaaggagaacttgacaacatccgtgcatgggggacgtatctgtccaccatcaaatataactgcgatgtcatcatgggagccactttcaaagtggaagataatgagaaaacagggggatacacagtcacagtagtaggttatcccggcatcttcgtcaactggcatccggccacaaaagaggattatgaatggattcgcctacaaaagttatcacccacagatggaaaaagccagatagcgcccgtcgttaagaataagaattaatcactaaaatattaataacaatgaaaaaagtactatcaatggttgccgcacttttactgtgcgtaggagctcaagcacaaatcgtatcatccagaagtgcaatcgtcaaaactgaaaagcaagccagcagcacacaatggttcttacgtgcaggcctgaatatcatgaacttctccggtgacggagccgaaggagctgattcaaacatcggatataatgctacatttggctatcagaagcctttaggcagtacaggaggatactgggggatggagtttggacttggctcccgtggtttcaaagtggacgacacgaaatgtatggctcacaacatacaatattctccgttcacattcggatggaaatttgctgtggcggacaacgtccgtatcgacccgcatgtaggagtcttcgctagttacgattacacaagcaaaatgaaagaagatggagaaagcatcagttggggtgattatgcagattatatggaggttgactacaatcattttgatgccggcatgaatatcggcgtaggagtctggtatgaccgtttcaatctggatctcacctatcaacgcggatttatagatgcattcagcgatgccgacggattcaaaaccagtaactttatgattcgtctgggtattgccttctaaggacaaccaaacctcaataaaccatattatttattcagcgtccacgatcttttcttttcacaaaaagggccgtggatgctgttttcttaaaaagaacggaatatgatgaccaaacgacaatttctggtaatcttgtatctactggtaggaattatcccactaacagcacagactttcaccgaacagaaaaagagctatcctgtcagtgcagacggcaataaatatgtggtcagcggatttacccctttcagcgatatgcaagacgaaaacatctacgctaatgcactgctatggatcgtcaagaatgtctgtccacagttacgggaaggaatagcggaggtcaacgtaccggctaaaaacttcagttgcgatctgatacttgcctcgcaggcagactcaagccaaaagaatacttactattgcaaagccctgtttcaagtaaaggacggcaaactggtttattatctttccaatatacggatagagtcatcagcagtgataatgaaaaaaatcactccgatggagaagctacaaccggacaagaaagcatctcacaaagaaatcatggatgatttcgtacaggttgaatcgcaagtattgaacaaaatgttcgacttcatcataacgaaccagctttcaccgattactcattggaatgaaatcaacatcaacaagccggtgaaaggcatgacggaagatgaatgtctactggctttcggcaaaccgcagactattcaagaatcaaatggagaagtgcaatggatgtattccagctcgttctacctgttcttcaagaacggacatgtggaaactattatcaaatagagtctaaaaaacgaatcatctcaaaatcaaacaattaaaacaatttattatgaaaacaatctggaaagcaactgtttgcatagttgcagtattactgtcgttcagcatttattcctgtggcgacgacgacgatgagactgtcggttcacgcgatttattgttaggaacatggaatggagtgtattatctttcacaagaatgggaagatggtgaaaaggtaagtgactctaaagaagattttgtaaatggaaccaaccgttattccatagagttcaaggaagatggtacgtatgtagaaaaagatgtctataactcttccggaagtactagttattatcatggtacatggagctactccggtaataagctgactctcatcgacactgaagaggataattacacagaagtgtggacagtgaccacaatgacagaaaatgaattagtctatgaacttcgtgaaaaagagaaagaagatggaacaacatacgaatattacgaacaacacgcttttacgagataattcaaaggcgttataacgcaaaaactttctttctttttcaggaggataaaattaagcaaaggtttctttggtaaaaagaaacctttgcttaatctattggaaaagcaattcaacacatcaatatgctactgtcagcggagtgcgcaacttctgcgcatattcagccatatatttattccaggcatccggagtcttgatagcggccttatcccaggcagaaccccaataataagtatattcagaacccggctcatattcgctgatagccaaaacatgaccgtcggctccgccacgttctttcttttccttttcagaaagaagaaccactttcgcttctttcacctgtgcaggaaatgcagcaccgacaaatatcttgccgtttgcaccgctacgatctgttgtaggatctacgtaagtgatatagccattggcagcatctgccacagtcgcaccgtccggttcacgcaatacaagtccggtagtcaccggcattgcttctttcagattggtatatgaaacaatcgttttgttgagataagaacctgcatccagtgagattacacgagtctccactacattagagtctccacggactaccagcggattaaattccagcttcaccgtgaaacgcagcggaccattatcaaggatttcctgtgtacgatagcagtaaggatagataatagtgtcacctgccatcagagcagcaacaccggcacccaacgtaggtcctacggcatagcaatccatgccatatccatgatcgatatggtaagagatagctttttgtagttcggaggcagctttaggatctgtctttttcaattcagctatcttggcacgcttttcaggattcagttcttccgcatagagagattccagaatcggttctgttgtgttgtacttcgtgaaaaggtcatagccgaaaccacgctctccgcgtgcttgcaaggcagggccatacgcacggaatccgccaagatcattctcccaggcaacgtcgtccagacgttcgggataatatttaccgcaagcaacgacatcgaaaggtgccggtgtacccggttgaatagtgtaaatagctgttccgttcgctgctaccgtagcggggaaaacaaccttttcgtcatacgtcacctgataaggcacttgctgaccgtcaacatcaagcactacaatctgcgctgtatctgccagtttcaatttggcaacaacatcgcccatcggcacttcaaccatctctcccacccgttcaagagccagcggattggtcactgtgattgtcattgactgtttactgtcggcacaagaagcaaaccctatcaagactacagcaaacagaattaatatctttttcataattagtctatattgaatgaataatatatactttgcaaatagaggctattatatccgcatctgttggatatatagatccaacgcatcagctatatatatccaacgtgttggatatatatgtccaacacgttgggcatatatgtccaataagtcggtcctatagctcctgcaaagggaatgataaaaaataaggtgacagatgaaaagaggatgctctttgccattctatcaccttatcggaatctcttctatcttacattatttcggctgttttccgatataagcaaggataccaccatctacataaagaacgtggccgttgacagcgttagaagcttcagaagcaaggaatacagcaggacctgtcagttcttctggatccaaccaacgaccggcaggagtcttggcgcagatgaatgaatcgaatgggtgacggcttccgtctgcttgtttctcacgaagaggagcagtttgcggagtagcgatgtaacccgggccgataccgttacactgaatgttgtattcaccatattcagagcagatattgcgagtcagcatcttcagtccacccttagcggcagcgtaagcagatacagtttcacgacccagttcggacatcatagagcagatgttgatgatcttacctgcacgtttttccatcatagcaggaagaacagccttagcaacgatgaacggagcattcaagtcgatgtcgattacacgacggaaatcagcagcatccatctcgtgcataggaacacgacggataatacctgcattatttacaaggatatcaattgtacctacttctttggcaatcgtagccaccatggcctgaacagccggttcgtctgtcacgtcgcatacataaccgtgagctttgatacctttttctgcataagctgccattcctttgtctaccaactcttgattgatgtcgttaaaacaaactttagcgccttgttctgcgaatgcagaagcaatagcaaaaccgataccataagaagcacctgtaacgagcgctactttaccttccaaagaaaaattcaaatactgattcataattctttttattattaaattaggaaaactattggatttgttatttcaaatctgtaatcaacgagaagtcctgatcgccatagtcgaggttctcaccacccattccccagataaaggtatagttgtgggtagcagcagccgagtggatagaccattcgggcgaaagaacagcctgatcgcctttcatccatacgtggcgtgtttcgcctacctcacccataaaatggcagatagcatgatcttcgggaatctcgaaatagaagtaggcttccatacgacggctgtgtacgtgggccggcatcgtattccatacacttcccggagccagttccgtcatacccatctgcaactggcaggtgggcaacacctgattcaccagcatcttattgatattacggtggttggagccttccaaagaacccatttcagctactacggcatcggctttcgtcaccttacggtcgggataattgcgatgtgcagtcagtgagttgaagtagaatttggcaggatgagcagcgtccttgctttcgaaagtcacttcacggttgcccgaacccagataaagagcttctttatagtccagttcgaaggttgcgtcgcccgctttcacaataccgggaccgccgacattgtaaatacccatttcgcgacgggtgaggaagaacggagctttcagcggatcgattgcttcaagcgtcagcacctctcctaccggcagcgcaccacctaccaccatacggtcgtacatggaatataccatatttacttcattggggacaaatatcttttcaattaagaaatctctgcggattcttgtagtatcataactttttgcatcctcaggatgcgcagcatagcgaatttcatagttcgttttcataccttatttatttatagttattgaataagttctctttctacgtgcacttcgtttacgtacacgatgcaaaaatagcaaaagaaaacgggtttaccttgcaattttgttccaattatccaccaaaaatgtccagaatctgtgcaatgtacacttttttaacgaactataatacgatttgggagagatttctacctaatacagtttgaaccttctataataaaacacggctcagttgtaattcttgggggattaagt

SEQ ID NO: 8284 - DNA, 3747 bp, Unknown
  gut microbiota DNA sequence
actgtacaggcatattaatgcagctacatcaaaaccttgaaacaataattccaagatgtccgcataactatatcggtatattaataaatgatatgagagtatcaatgaacgatataggcatattgatacagcctcatcagcctatcaatactataatgtacgaatggacagacttgtatccttacttgccaaacaataaaaaaaacaagctgacaatagaattctcaattcttattgtcagcctattatcagcttctattgtcagcatgtattatactgtaattcatatctttaactgccgtcctgacagattgacaataaaaacagtataaaaacaactagtgtagttagttcttggttagtaaccgcttctccgaaatcgttcccaactcttttccgttaatggtgatatccgttgtattttctatctgtatcatagattgatcgggagtgtcaatttccacattctcaatgttgagctttgccactttattcactacaataccctctttagcacctgtaaccaccatattcttgatggaaatattctcaatcggcatttcgggaagtccgttcagatacgctgcccgtcctgctcccctgcaaaatacatccgagatatagatgtttctgaaagcaggcgtctcctcactcacactcggaatcggttcaccgggagcgcttttggccgcgtaatacaagtcggcaatcaaggcatcattaggaatatcaatcatatttatattattgatataaatattctccacgacaccaccacgtccacgggcacttttaaaccgtaagccgacatccgtaccgataaaagaacattcggacacatacacgtttttcacaccaccggacatctcactgccaatcacgaatccgccatggccatgcaaaacggtgttgtttctcacgattatattctcacaaggttcgccccttctgcggccatcctcgtctttgcccgacttcagacagatagcatcatcccccgcatcaaagaaacagttggcaatcaatacattcttacatgattccacatccagcgcgtcaccgttttgtgaataccagggattaaatacctttacatcattcaatatcaaagattcgcacaacaagggatgcagacaccagctcggagagtttttgaaggtcacaccttccagaagaatctttttgctcttcacgatacttagcaatacgggacgcaaccaactcttcatatcttcccattcttcactcgtgatttcagtccgtttatctccgctgccggccatgagaacagatgctttcagcgctccttcattaggataccacacctttccgttctcatccaccttgccaccggagttcaccagattcttccattgcctgtccgtcatcttatccttcttcacaggacgccatctatcccccgccccatcaaaaacgccataaccggtgatggctatgttctccgcattcattgccgagataggcgactggcaacgtttggcatccagtccttcaaacgaagtggtaatgatcggatataatgaagtatcactactaaatacaatcaacgcatttttttccgcatgcaaattgacgttactctgcaaaacaataggtcctgtcagccacaagccttccggaatgattaccttgccacctcccttatcatgcaccgctttgattgcattattaatagcctccgtattcaacgtcacgccatcactttttgctccgaaatcgcaaatgttcacctgataatcgggaaaagaaggttgctctacttcaggcatcgagaagggaaggtctttatatacatccccccacttgtttccctcacatttagaatttgaacagctctgtcctaacacaacagagaaaaggataatcagaagcgttctcattttttcttcaaataatctattcattttttcaacctgattttaattacgaatacatggttgcatgacgtaacaactatttccattttcctttagaagcaagatgctcacttctaaaaggaaaatggtgatacataaatatttatattaaggaatccaacgggtgtcccccacacgattgattacaattggtgaagaagcatccttgattgtcaaatctccattcgcaggatcgacaaacaaatcggcagcactgacacccaactccgtcgcacgaaggttactacctcccaaagcgtaatcggtagtaatataattgtcagagaaagtagttgtcgtgtttgcaccaagagagtaagcctgtccacaaggtgatgccaacaggaatttctccataatcagctctgaacccacggcagccggcatattaatcatcatgctgtttatacagaaatcataaacagtcacatttttatattccagatgaataggcgtactcatgtcacgcgcccagaataagttaccgaaacttcccgtacctgccggtaatccctgatgatctctgctgaatgtacaatttctaaatatcgctctgtccatcgtatcgttgcctgctcccgaacctaaatagatcgtaccatacgtacctccggcacgtgctccacataaatccaacgtacaatcttccatcgagaaatccattatatacttccggttagagccctgatggcgccagaagccacgattcagtccggtgaatgtgcagttaaagaagctaatattttccaatgtataagaattaccgcaattaaagaagtaattgtcaagcacttcctgtttgaatttgatattctcaaattcaagactggcaatataagacccggaagcaattctccacgaacttgtcaatacaacctctgccatttcaccttcggtgctacctaccaatttaaagcctttctttatctcaaacggagtcaccgtataagaagaacccgccggcaagaaatattccgttccctccggaatatctgcattatcgttgttcgtatttagtatttcagacagattatcatcccatcctattataatcgtttccatagacggacctgccgtacggaaagttacctgattgtacggtttgtcatactggcggggtttacccgtatcatacaaattagctgcatacaacgtatttttagtcaatccgtctatttccgcataaccctgtgccatttcctccgccgtcaaataacgggtcacctcttccagcgtagcgtccatacttggcttcacgctgatactgtctaccggattctccggatcgatcgcccaacggataaccgctgtgttttcagtaatctctcctctggagacgtcctccacaatcttagcatagtcgggacgaggttcggtggtagccgaggcataagcccactgtgaattattgatagcattcgcagcattggcacgcacacgaatataaaaggtagtcccatacggtatatcgtccatgaaaatataaggctctgttgtttccaccgaggcaaaaagatttctgtaatagttatccaaatgatattctaccgtataagaaactgcttcattcactttataccacaccaaggcaatggagttgctcttcacttccggttcttccaacacataacgaggctggaacaggtcgtctatcttatgatattcatcctccttacaagcggtgaaaagtacaccggaaagcaacacggacatggtcattgccgaccatatatattttaatctcatcatagttctttcaatttacttttgaattcattgctgtcccattaaaatctaaaatagctctttg

SEQ ID NO: 8285 - DNA, 5301 bp, Unknown
  gut microbiota DNA sequence
ttatgctcctattaagcattcattcggacttaatcttactagcgaagacctttcaattggtttccactacgcattctgataagaagaaaagtaattcaacaaaataggaaagggagttctcaaaaatagggaattccctttttttatgtataatctctataaattacgcacttgttaacgaaaaagttgtttaatacaaattacaattatacatttgcattgttaaacaataaggtcaataaaaacctttagtattaatttaaaactttaaaattatgaagaagagtgttttgtttgttttatttgcgctgatttcagtagcaggtttttctcaaattacaggttggaatgccaaggtagggatgaactttagtaattatacaggtgatcttgatctgaatgcaaaagttggctttaagcttggaggaggttttgaatatgcttttaatgatacatggtcattgcagccttcattattcttgactagtaaaggtgcaaagaaagatggaaatagcattaatgcaatgtatttggaattaccggtaatggctgctgcacgttttaatgttgcagataatacgaatcttgtagttaatgcaggtccttattttgcttgtggtattgctggtaaaacaaaatttgatttaggaaacgatacagaacgtaaagttgatacttttggtgatgatgctttgaagcgttttgatgcaggtcttggcgtaggagttgcattggaatttggtagaatcattgcaggattagatggtcaatttggtttagttgatgtggaaaaagttggtaatcctaaaaacatgaacttttctattgttgtaggatataagttctgataagaaaacactgaaaatatagaaagccgttgcagaaggtaattcgcaacggcttttttaatatttcatgattgggaaaaacacttctcttattggataaaatgaggaagcataaccagttagttttatgatcggctatatttattaatctgatagtttcttcagctttttgaaatgctcgattacggctaaataattttggtcctgacaagcgtcgaatctattccagagatctcctaagacgacagctcctccaaaaccgaaatccttaatctccaataaattgtcttcattgatacctcccaatgccatcactttcgagtcgataatcttggctctttgtgcttcgcgtaactcttcggcagcgtatgttgagtaataattcactttagagatgctgtcatagataggactcataaaaacatagtcgtaaaagtgctttctgttttttacctcctccactgaatggcaggaacaactgatatgaccatagtaatcatgcggttctttggggttacgtgcattcaggtggattcccatcaggttgaattcttctttcagataaaaatgctcatgtgtaacgatgcgacggtgatatttatccggaataagtgtcaatagccgttccgaatacatagccggagtctccggcttcctaagatgtaggacatccagcccctcttcgaaaagagcagtaataatcttatcttcttcgacgaagaaagtaggggtggtaactacaattagtttcatttcttttgttaaaattggattgtttagcaaagttactaattaactatgtcagaaaccaacctttatagtgaaaatttgttagattgcagtgtccgcaggtcaattgtccatagttcgccggctaaaacatcaccaaaaccacagattattttcagtacttccgtagcttcaatgctccctacaatggcaggagtaacccccatcactcctttgggtggaggaggcatccgttgcatttcttcttcatcgggataaagatcccggtagtttttcttttgatttccgtagttgaacacagaaacctgtccttcaaaaccgcagatagcaccatatacgtagggctttttctgtgcaatgcaaatgtcgttaatcaggtagcgggtggcaaagttgtcgcagccatccaccactatatcatattcctgaatgatatcatacgcattgtctttcgtcagccgggcagcgtaggggtgtatttcgatctcactgttaagagcggagagccgttccgcagcacagatagctttgggtttacctaaccccttttcggaatagagcacttgtcgttgcaggttggtgacgcttactaagtcatcatctaccagccccaggcatcccacaccagcacctgccaggtagagagcgatgggagagcccagccctcccacgcctacaataagcactttggcttcctgcagtttcttctgaccttcttctccgacttcgggaagtataatttgtctgtcgtatcgcatctgtttatcttttaaaatcaaaagactgatcccaatctttccagacgggttcacgacccagttttttcaaatcacgttccacttcaaccgcctttcgctcatcacttacgtgaaattgttccagggtttgaggataactgaaatatcctcccggttcagttttactttccgcactcatggtggttacgccaagtgttgccatgtggtttcggatttctgcgctctcacgggtagaataagagatatctacatcatggtcgaagattcgcatggcgaatgtaagttgggcgagttcccggtcattcatgactacattcggctggaatccgccgttttcagacgggcgcatacgcgggaagtttacgctgtatttcgttttccagtaatgtttctgtaaataacgcagatgataagccatcatcgttacgtcggttcgccattcctccaggccgatcaggacacccataccaatcttgtgtacacctgcctgtcccatgcggtcgaagccgtttacacgccattcgaattttgacttcatgcctcttggatgatacgttttgtaatttgctttatggtaagtctcttgaaaacagatcactccgttcaggccatgattggttagctccttgtattcttccgctttaagaggcattacttcaatttgcaggttgctgaaataaggctttgccaaatccaacgcccgggcaatgtatgggacacctgctgcggccgggttttcaccggttacaagcagtagattctcaaaaggagccaaccgtttgatggctttgtattcattgacaatctcttcctctgtcaatatcgttctcttcatcggattgctgatgtgaaaaccgcaatagacacaggaattggtacatgaattagtcaggtagagcggtacaaacatagagattgtcttaccgaaccgttccattgtatatttctgactaaggcgtgccatcacttccagataaggagtggcggcaggtgaaatcagcgccataaagtcgttgacatccagatgctcttttttacccaacgcacggcgtacgtcagcatctgttttggaatagatggcttttgtcgtctcttcccaggatattttttctaattcgtctgagaacattttattcaattataaattaaaaattgaaaattaaaatgaggggagagaggtaggtcagtggcccgacgttttgtttctccccactcattatttattgcctttggcacttttctttaaatcgcgtgacaatctcattgcacagaaattaggtccgcacatcgtacaatattctccatcgatatggtgtcctgcacggaaataggtctgcgcccgttccggatcgagagataggtcgaactggtctttccagcggaactcatagcgagctttactcaatgcgttgtcgcgtacctgtgcactcgggtgtccttttgccaaatcggcggcatgagcggctatcttgtaggtaataactcctacgcgtacgtcttctttatcaggtaaggcaaggtgttctttcggggtgacataacaaagcatagccgtacccaaccatccgatttgtgcggcaccgatagcagaagtgatatggtcgtatccgggagcaatatccgtcaccaacgggccgagcgtgtagaaaggggcgtcatggcatttttcaatctgacgttccatgttctctttaattttatgcatcggaacgtgtccgggaccttcaataaatgcctgaacattcttatcccaggcacggagcaccagttctcccatggtatcgagttcggcaaactgcgcttcatcgtttgcgtcgtagatagaacccgggcgaagtccgtcacctaatgacacggctacgtcatattgtgccagaatatcacagatatcgtcaaaatgatcgtataagaaactttcctgatcgtgtacgaggcaccatttactcataatacttcctccacggctgacaatgccgcacaagcgattatcggcaagatgaacattatgacggcgaatccctgcatggatggtaaagtaatcgaccccttgttcacattgttcaatcaatgtgtcccggtagatttcccaggtgaggtcttccactatgccattcactttttcaagtgcctgataaataggaacagtgcctaccggtacgggacaattgcggataatccattcacgtgtttcatggatgttttctcctgtggaaagatccatcaacgtgtctccaccccatttacagctccacagtgctttctccacctcttcatcaatgctggaggtagtagccgaatttccgatgttcgtattgatttttacaaggaagttacgtccgataatcatcggttcagcttccgggtggttgatgttggccggtagtacagcacgtccctccgcaatctcctgacggacaaattcgggggtaatgtgagttttaattcccagttcctcacaattcatattttcgcggatcgctacgtattccatttcaggagtgataattcctcttttagcatacgccatttgggtgattgcttctccttttttagcacggtagggcagggcgatgtgttcgaaacgtaagtgatcgagacttttatcatctcttctcatttgtccgtattccgaagtaatttcagacaactgttccacgtcaccacgccccacgatccattcttcacgcatgcggggcagtccttttttgaggtcaatgttcatttccgcatcactgaacggtccgctggtatcatatacatatatttccggatttggtgttgctatcttttcttcgccttcaaagctgacactgggcacttgctccactttccgcatggcaacgcggatattcggataaagtttaccgggtaaatagactttctgcgaacgggggaattttattttttgttccatagtttatttgttttaatcaagaaaagccgtt

SEQ ID NO: 8286 - DNA, 915 bp, Unknown
  gut microbiota DNA sequence
acccagattggctgccgaactctggttccaccaaacaggttgggaaatccggtcggtcacttgaatcgtgacgtgtttgtattctgccggacccaccagacagttttccactgcatccagtgaaagggtaagggtgtagtctgtgttgagcaggtcttcattgcgatagacggtgacttcgtaggtgtcttccgccagtccgctatggaagatgccggaggtcaaaggggcatagtcgatgccggaacgggcggtgcttttctctcccactgcggaaatatcacaggtggcattttcttcgagcaggtagccaagaagtgtcattttcactttcacggttccttctcgaagcaagggtgcatctgtagcaaagttgaatgttattttctgtggagacttatcgctcatgtaagtaaaatagacgtaattgtctccattataaacgtccagctgctcttcactgcaagaggtgagaacgaacagcaggcagaagatggtatatgtcaatattcgtttcatcttatccgggcattagttggttgtttcactggtaggcaatggaagtacataagaacctgtcatgttgatttctccttcctcgtcggaatcgggcacggtggagaggttcatccgtttgtaggtgtagaaggttccaccttcgcctatcatttctttccgtatatcgagcagtatttcggcatccagttgttcacgggtgctgactgtcagactaagggtacgttcagctccacgggcttttcgaactgtttcgaggtagttgattccttcggttatcttgccattatagctactgatctccgccaggatatgacagatttcactgaaccggatcactggtatcatcggattctccattgcttctactactgattctacggaagggttatacttcag

SEQ ID NO: 8287 - DNA, 4876 bp, Unknown
  gut microbiota DNA sequence
tgatacgggcaaagtgaaaccattcggtcagaaagataatgggggcgatctggtagagacagctttcctcatccaagggctgctggccgtacaccaatattacgtcaacggaaacgagaaagagaaagccctcgcccaacggatcgaccagatttggcgggatgtcgactggaactggtatcggcaaggcgggcaaaacgttctttactggcattggagtccaacgtatggctgggaaatgaatttccctgtacacggctacaacgaatgtatgattatgtatattcttgctgctgcttctcctacccacggagtacctgcggctgtctatcatgacggttgggcacagaacggggccatcgtttctccgcataaagtggaaggaatcgagttgcacctccgctatcagggcaccgaagccggaccgcttttctgggctcaatactctttcctcggacttgatccggtgggactaaaagatgaatactgtcccagctacttccacgaaatgcgcaacctgacactggtgaaccgtgcttactgcatccgcaaccctaaacattacaaaggtttcggaccggattgttggggactgactgccagctactccgtcgatggatatgcggctcattcgcccaatgagcaggaggacaaaggagtaatctcccctaccgccgcgctttcatccattgtctatacaccggaatattccatgcaagtgatgcgccatctatatggtatgggagataaagtgttcggtcctttcggattctacgatgctttcagcgaaacggacaattggtatccgcaacgttatctggctatcgaccagggtcctattgctgtcatgatcgaaaactaccggagcggattattgtggaaactcttcatgagccatcccgacgtacaggccggattaaccaaacttggttttaacaccaacaagcaagacgtgagacagaaataagagggaatctcggtgtgcggaagtggtctactgaccacctccaccaccggtgtttccacctcctccgccgccacctttcacatcgtcattgtcgatgcttcgtgcggctttcttcacactggctttcaactctccaagccgatagctaatactgaaaccgtaataccggctcggatatttgctcgaactcttcgaaataaagttagctccttctgtgtggttattgtaagttctgtatttctccagaacattgctgcaataaatattcaaagaaagacgttcttctttcaggaaagaacggctcaatcccaaactataataactatatcctgaaccttttccctgcaaactgattcggggtgtgctacctccgccgttcaggctcaaacgtacttttcccggtaaggtctgctgaattcctccataagcagaagcattccatccataattgtgcaactcttgggcaggactccgcaaatcgctataattgccacgtccattgacgtaaattctcgttttaggagaagcgttccagttcaaataaaagttcaatcctgtttcccggctctttccgatattaccgtatgtgctatacagtgcaccgtagggagctttatgcccatcttcaaagatttctccgtctttatcagtaatcaaacggctgattctttcaattccattgttattgaaagaatgacgcaaagaaagattgatgttgaacttggacgtaaaactgctgtaagacaagtcgaacgaatgactcttctcactcttcaggttcggatttccctgattgataaacatcggattctgattatcgaaataaggattcaaattccagatacccggacgccagatacgcatattatatccaccacgcaaattctgcgtctttcctagttttattcccaaggaaacggaaggaaccagatcactaaaattcgaatcaaagttctcgcccggacccaccagatacttcacctcttgtatggtttgctcataacgtaatcccggtttgaaagtaaatcccttgtatttcagcgtatatccggcataagcagagagaatatgattcaaatgacggtactcgctactacgattctcattatatgcatagttttcacttgctccctcggcttcataaaaccgattatcactggagttacgtcggaaaatatatttggcaccggtttcaattgtatgcagctttccaatcggagtagtatagtccacctggaaagtctgctccatcgtatttgtctttccgtccgaatggaaattctttaatgacaattctttaatgatatccagtttattctcatcaggctcgatgtccagataagtattatatgaatcattcgtttggggttgggaattgattttataagaaaacgtaatcatccgttctttattttttcgggaagtacgttgatagtctatatttccgttgatagaataccatgacccttttccatgattgtcggttctataacggtacgcaaaatcctgtcgatcagctccgtgcataatcgtatttccgccactgttacttttgtcactgctaccgtacattccgaaagccacggtcagcaacctcaacgtatcaatctcgtaactggcttccaaattgccatactggaaattccctttcgacttggagctactttccgattccagatatttttcattctctttatccggttcgtagttttcgcgataactgtcggaatagctgcgcgggctattattataattgtagttatagttggcagaaacagtcagtttaccttgtttcaccattgcgtaagtgccggcacctactccgttattattagcatttcctctgaaagtagccgtgtatccttcaaatccggaacctactgtgacgatattcagaatacctccgataccttccgcatcatatttagctcccggtgaagttatcacctcaatatatttgatcgtgtttgccggcatacttttcagtacttccttcggattattactcatcatattattgggctttccatttacatgtatcttgaaactgctactgccgtttacttgtacattgtcttctccatccaccgttaccaaaggcactttccgaagcatctccaatatactgttcgattttgagtccgggtcatcttcaatattatattcaatcttatccacatctacctttaccaaaggtttttgtgcaactacctccactcctttcaatacgttattggcttccgaagaaatcattgtacccaagtcaacctccttcacggacggttttagagtaaattcctttactatcggcgctttaccaatcgaagaaatagtgatgatgtaattgcccgcagcgacattcagtttctcctgaaatttaccattcgccccagtcaccgccatcttgactgctttatccggagcatttttctttgctattttgatggtagcatacggttctccctcttgtgttaaagaatcaataagtactcctttgactgtataagaaggagctgtggatttttgtgcccaccccgccacggagatagcaaatacgaatagaattagtagtaacagtctgtgtttcatgactagaaatatattagtttatgtttattagacgcaagacattcaaaaatgctgcaaattcgagagccaaaagtagttggtttatctacacttacgaatttttcggagttaagaatataaaacgaatggataaaaaatcttactacagtatatttctagtatttttaaacatttctgtttagggatatctttaaatatatctattcagggtttaaaatgagatagaatggtatttaccgtcgtatcaaccgtatcagccgccttaagtgagcgcagattcttccaatccagcaagtactaaagttctcttcatatttcgtgaacactttctcacaatcccgaagccggctgttttgccttttcatagctgtttgtatctctttcattcgagctatttgctctctttgatacaagagttctttgtcttgacagccaataatttcagcatataagttacagatatttgctttttcaatacataggtcttccaatgtgtcgatatactcggctgtaactcgatccttattctgatgcaggaatccgataaggctttcttcatcaacagtggtgatacctttctcatacgacatcgggaatcttttcatatccgcccaaagccaaattacttctttgttgattccatacttggccgccgcttcttctacgctaatccattttggcataatgcttttgttttaatgtgttccacaataaaaatggagtattattttgtttatgtggcacaacgggcatccacgttttctgtatttcgggcggacggggaattgtttaggttagacttttggggtaatcataaccgaccggacacaaaaaagacgtgaatgctgttgcaccattatctccactcgaggtcttagcataccctatagaaagacaatgataacaacagacatccacgccaatcgtttatatataacacatctccaacggatatgttgatataaagccgttcgcgtggaatatctgttgaatcatctctcctctatatgaaattgctaagtttcgagtgggagagacaatacattacatattccatttagtaatatatatcgccttctactagtttcatcacgctgatgagcagaaagcgtatgacaaagatatacatattttttgaaatgtggtggaaatatggaaataaatgctggaagttatgtatattcaacaagccgactcaattgtaattcttggaggatttggttcaggacagccatatccctaaaatttgattcattcctgcactgatttgagccgaaatatgatctcacaatatttcactagagatttaaaaagtgaaaa

SEQ ID NO: 8288 - DNA, 8150 bp, Unknown
  gut microbiota DNA sequence
tcttcccattcttccttgggttcacttacacatatggaatatatgaccaggtctttggtggaatacttactccgcaattgtttcaaaggttccatttctgccaggcatggtggacaccacctagcccaaaaatcgaaatagattacttttccgtgattcttctcaagtatattatagatgggttccatgtaaggcatagatgtttttagctttgagttttcgtgaaactcaccatataataaattgttggaaactggttgcggattttccaggtaagatttagtctgattatatatctgcatcacttgtgcacgcaaatgcggcatttttacaatcgaatcaaactgtgtatgccttgttaaagcaagtgtatcatttgcattcaaagagccaactgccattttggtatatatatactggttcagttcattctctcctactgccgacataatctcttctacagatggattttttttatctttgtaagttatcccataagctatatagcgttctacttcatcggcaatatcatataaacgtgccgaaagaatccctttattataaagtttattgattgcaggcagaagtttatgataccgatccatttcttttctcgttttaaactggcattggttaccataggataacaaagcgtaataataatcctgtttcagtaactcttcagtaaataacgtaacatcttccattggcttatacttcgtcagatactcgtttcttcgctccaaacgaaagtcatattccttctttaattcagcctcaaaatccttaatattcaaattcgggtttatactataattctgtatgtaatagtaggcgctttctgtaaatgccagtatttcttgattcagtttttctgcatcacctgttactttgggatgaaaaagatctttgaagtctatttccacatatatgctatctcccgggtggatatacaaatgttccgcataattgcgaatggaaacttctcttaattttgcataaactggaaagcggaatgaaaatgagccatcttcttgtatgggggtacgatattgattttccattttccaaaaaaatggaatgatgagagttaattctctttcttgaggataaaagtcccggttcaacacttttcctgtgataacagcttctttaatatattcttttgctaacggataactttcttctgtctgtacagatgattcgaattgagattttgcccggtctttttgcccgcatccggctaataacaaaaatattattaacaaaaaagaattatcgtgtttcattgtacctgaatattagaaagttcataaacttaaataaataagattcttgcctccaaatatagaaaattaatttcatgggaaagagttttgtaactgtttatatttgttatatttgcgcaatcatcactatttgaactcatgtcaggtattaaagatttagatatattattatccaatatggaacctgtattggataaacgtgactttgttttttgctctttcccgacatttgattgggataaaatgcgtgaattaaacccggtcggtttttttcaggagaaagaaggtatgaccttcattcttgacctgaaagatgccataggcaaagatatggattgccagtctgtttacaggcttattactctcaatgtacattccagtttagatgcagtgggcttgacagctgctttctcggctaaacttacagagaaaaacattagcgcaaatgtaatagcagcatattaccacgaccatatttttgtgcctaaagagaaggcggaacaagcactgaatgccattctcgaacttcagaagattaaataagaaaggtacccaacgcaatgtggatacctttatatgattcatttacataaaccggaaaatgactcgtccggtttgtggaccatttacccatttcggttgtgaagagggaccacacaaatcggtggagtttactttattacgtaccggaggaatcacgttcaggacagagattccgctttcgggaagagtataaagtaaacggtcgcggccatcacgaggctgatatactccgatatacgcgtcgggagcttcgtttgtcagactgatagtgccttctttcgtttggatattcatccaggaaacatcaccaaagtatcctttgaattcgggatatgtgaaggtctcacccggaataggatcgttatagtcgttttcccaaacatcgtattgtgttccgtgaatacggttttgccatacacggtaaggtccggcacccagccagcgtttgctgattacctgatcttcaggatagtcgaaacgaatacccatcaagtctacgacaccggagaaattgtaggtataatccaaagccagttctccactcgggttaattgtccattgggctttatccagattgcctagtttataattggcggtaacaaccagattacctccgtcttctttcacatccagtttcgtaaatacggcagcatcagggaattcgctgtatgtgcggtctttttcttttgctttctcatcatcatggttatagaactgatccaatgagcggtctgcacgacgggctccaatgaaacggggaccattggcgaagttaatcttacggttatctacagatacccctttcagttgtccgtctttctttgagaagatgaacgtacgcttattcgcttttacagtaagctcattttctgtctctgtataagtaggacgactggacaagggagaaagctgttcagtctgctgattcagtttgttgaccgggaaagtccagcgccaaagttcatggccgtatggatcgattgctgtcaggaagagggcgtctgcattggagaggatatttgtttttatatccaaaatgcctgccgagtgagcaaccacgtcactgccttgcacttcaccctctttcaacacttgaatagcggcattggatgcatctgttgccagcgggaattttacttgcttccaaaggaaacggcaagtattcagattcagataatcgtaacggttttctacggagaatttgccatcaaattgcttgtcgatagaagtattcatgatttgtaccggactccataactgcttgatagtgtagtagctaccctccttttcgtgatgtggccctacaataccgtctgctccaaagtttccttggttatcaatgaatccgtccatatccacacgcttcacaccttcgtctgccaatacccaaaggaatccaccgatacaacggggatgcttgcgcatcatttcccaataatcatataatccggcaccatggccgccatcgtataaaccatgcaagaattccgtaggcataaagatttccggtaagcgcatgtagttctggctttctccgtaagagcggtaatgcatggtttcaaaaccggagaaattgccttgcgggtgaataaccggacgtttctgcggatcgtatttatgaaactctccatccagttcggtattccatcctttttcattaccattactccaccaaataatagacggatgattcacgtcacgttctatcattccttcaatcagacgtactccggtgggggtatcatacttgccatgccagcctcccaattcatccatcacataaagtccgagagaatcacaggcttccaaaaattccgggtcagccggatagtggctcaaacggacagaattcatgttcatgcctttcatcaaaagaacgtcttcgatattcttctctttactcaacgtacgaccactttcaggacggaaactatggcgattgacaccacgtacattgatacgtactccgtttatataaagtccgtcgctttcgcgtacttcaatcgtgcggaaaccaaaattttctgtttcactatgcaaaaccttaccggccttatccaatagagagaattgcgctttataaagattcggagtttccgctgtccataatgcggggttagatacattcagttgcagggaagtccagtcgcctcctgcttttacgggtacggtggtttccgttatctttttcccttttttatctaaaatctgtgtacggatgctcattccgtcattagagatatttgtgtagcagttggcacggaaagttccatccatctttgcgtcaatggcaatgtgccgcaggtttacggctggtttcacctccaggaacaccggacggaagataccgccaaaattccaataatcagcacgacgttcggcaaggttcacactagcattttcactctctttggcaacagtgacttccagtaaattctttttgccatatttcaggaaatccgtgacgttgtatgaaaaacgatagaaggctccctgatgtttggaacccactttgcgtccgttcacttttacttccgtgtctgtcattgaagcttcgaatacaagattgacctgtttgccgcgaaacttttccggaacttcaaattcgtacttatacatccctttttcatcggcaacgcctttaggaaatggctttccatagaaagtgattccatactgataagtgccgaagccttgcaattcccaacaggaaggtacgccgattttcgtccatttgccggaattgcgtccgtcggtacaaaagaagtcccattcaaccatatcgtcgcatccgtgaccggagagatattgtctttccgtttgtggaaggttttgagcagccagggtagttgccaacgctaaggtcgataataaagtggttacttttttcattgttacttttataattgtgttagttatttatttctatcattgtttactactgatacggagatgcagcgtatgttctttcttctctatggcatatttcttcaatacacccggtccgcaactactgtttcctaatccaagtacggcagcatccatactaagaataacttctgcacgtggttttaaatcgcaatcgtgagtttcttcatagatgtcttgtacggtgtaatgcagggcagatgcagaaaatgcgttttctaccgcgtcaacacgaatgcctttattctgtttgtcggtcaaggtaagataatgcacttcctctttgtttccactgtcctgcggacgtggataatgtacgtattggtctgcaacgcttcctttccaaagccctatcatagcagatgttttgcggtcaggatagttatcctgtggtcctctgccataccaggtaaatgtatcataagcaggcgccagacagaatgcgattcctaaacggggaatttcaggaagaactccttgtggcaagaaagttgttttcagatcaatcgttccatctgaaaagaccgtatagacagaagtcgtcaccacttttccttctttatataaattacttgtttgaatccggacaatgaccgccccgtctgcacgtttttcatggtggaaagattccagatttatctgcggatgatccattccatgcaatttccagtctttagccaaccagtttccgaagctcttgtcattatctgtcggagcacggaaaacttgagtgacaggctgaaccggaaaatcatcggagtgagccagcatttccttgcccttatatataagggaagtcatacttccgttcactttcttttcccactgaacagaaaaactgcgcccactaatcaataaagatttatcatcctctttcacctgaagcgctcctttattaatcagatcggtagaggctaaatctcctttctgcaagcagaattgttcccaggccacttcatgtcctgcctttgcccaaagagcatccgatttcaaaacaatgcttactttcagctggtaatcggaaagagttttctccgtttttttattggtcttactaactttctcatttttattactcaaagaataaatatcttttaatgatcggaaagccggcaaatcaatcgttttactttcgcctggagttatttccggcaatgttatttctccccgttctttctccttaccatccactgataatgtccacaggcaacgataaagtgataaatcaatatgatgattccggttggttactctcaactctccattctcaactttcaactcaactggtgcatataccttttttacctcccaatatttaggcgtagtttcacggtcgctcatcagcaatccattaaagcagaaagcttttaaattcggcttatcgccaaagtcaccgccgtaagccaccatggtacggccatcgggtaatgtcttgtagattccctgatctacccaatcccatataaaaccacctagcatacggggattgctatatatctcatcccaatattccttgaaatttcctaatgcattccccatggaatgtgcatattcactcgtcatcaccggacggtcgtcattggtacgttccgcaatttccagcaaccgttcccaacgtgcattttcagcgcgttccttgtcttctccctctgcaatgccgggatttaagtattcctgtttcacccgggtataaaagcggctgataacatcgaccgtcttcgggtcaggatttccgtccactccctgcgccccctcatagtgtacaggacgagtgggatcgaaatcatgcagccatgccgaaatagcagcgaagttcggtccgtaaccgctttcgtttcccatgctccacattacaatacatggataattcttatcacgttccgccatacggaccgcacagtccataaatgctgcatgccagtcgggggtacttgcgagtgttccacgcaatccgtgttcttctatatccgcttcgtccatcacgtacaatcccaagctgtcgcatagctcgtaccaacggcttacattcgggtaatgactggtgcgcacagcatttatatttgcctgcttcattaaaagaatatcctgaagcattcgttcttcgctcatgacacgtgccgtccgtggatcatgttcgtggcggttcactccacgaaaacgaaccggattaccgttcactaacagttgtccttttttgatttctacagagcggaaacctacggcctgttctatctgttctacgacttttccttctccattttggagagttaagtgtaatttataaagatagggtgtttctgccgtccatctttccggcgattttataatggctgacaaacgtcccatcttacgcgggccacgctgcggataccattcattcatccggcttgctttatgctccaaatcaagcatatcttccacatcacctttcaatgtggcaacttctttgcctgaagcatcctttaatactccctgtaagacatacccttttccggtcatccctcgatatacactgaattgcggatcaatctgcaaaataaagtcttcataatcaccagcagacgcaggaagagtgcgtaccgcataatcacggacatgaatatccggcgtatgtatcagatgaatactacgatgaataccaccaaaacgccagaaatcctgatcttccagataagaaccgtcactatatcggtagacttccagtgaaatttgattttctccggatttcagatacttcgtgacattaaattcactcggttccatactgccttggctataccctacccgtttgccattgatccaaacataaaaggcgctcattacgccctcaaaccgtagaaaagtctgtccattcgcttcccatccggccggcaagacaaaggtacgacgatattgccctaccgggtttcgttctttatacgtggtatagtcagttttcggttctcccatcacccgtggaggatctattttaaacggatagcctgctgaaacatagataggcgtgccatatccgttcacttcccaattggcgggaacaggaaaatccgtccaatctttatcattaaaatttgtctgatagaaattcacgactctttcattgggaacgggagtccaacggaatttccaagttccgtctaaagagattgaaccgtctcctttctgtacagagaaaggagtaaaagcggctcttgccggttcacgattgatctgaagaacatgatgattctcccaatcatgcattgtttgtgcctgtatcgggcttacaaacaatacacccaatagtaaagtatatattttcattcgttcttttttcttcatatcaagtagacggacgaaagggcattttgtacccctttcttttattggaaaagatgaaagtttcattctatt

SEQ ID NO: 8289 - DNA, 2341 bp, Unknown
  gut microbiota DNA sequence
aacttcttcagattcactgaatcctgctcaaattcgaatggtatatctttccaaagcgtatctactttttgccgcagatgtatggcggcagtgtcataactggctatcggttcttcaaaattcaaagaaatagatccatatacatccattgacgaaggggcattgacattcaccggcaagaatttcgtcggttcgggttcatcctcttcccctttctttttcttctttttctttttgtccttatccggctcctctttcttatatttctgtttcgaaacgaggttcagcgtatctgtacggggcactagctgattcaaagtatctgtataaagataagtcagactcatggccagcgtatcctgcttgaagagcagagaatctttcacccaataatggatcgtatcgttccgctgattcttttcgatgacaaaagcatccttttcatcgaagttcaaacctttcaagacaggcaaagtgtccgccttaccggcaaaatagaaagtgaacttttgaggaaccagtctttccgacttgataagatattgcgaatagttgagctctttaaaagcacggagaatgacatcatccggcaaataatgcatatatttcttctcaacaatcgtgtcgtaagtcaatgagtccacccaagccgtatccatgcggatgcgttcttccatgcgggggataatcaacgaatcgtggaaagcgatcatctcactcttctggttgaaggtaaaattctggtcggcatccatcaatccatagatgcgatatttgccgggagctacaccacggatggagaaacgtccacggctgtctgtacgtgccacacggtcgaaaggcaatttgttgaaagccgaatcgttcaggttggaatgtagtccgacaagcatacctttaataggctccaggttagaggcatcgagcatcgttcctgctacttccatcgtatcgatttccgtaccggtagagaacgtaaatgcaaagttacccaacggattaccttcattattgtcgacaattgcatccgagaagtcaatcgtgtaggtcgtgttaggtttcagagagtcgagcaggttgacttgtattctcttgccggaagccttgatttccggttgctgtatctggggaggggaaacaacgactttctcggtcgctttctccagcttaataaactcgtcgaacatcaaagagactttagtccttttattattcaaagcccccgcctccggagtgctaccgatgaaacggggcggcgtctcatcgtatggtccaccgtccggacgtccaatactggcgcaggaatataacatcgcccccagcgttactaccggaagcaccttgcgaactatttgttttatcttttgattctcaaattgtaacatgctgcaaaaataagcgttcttattcaataaacaccacactttctagctaatttattaaaaaaggaaagggtgacttaaggtaataaacaatatttgcgacgtttttatttttttcctgctaatataattagttttattgcttaaagagattacctttgttgcctaatcttttttcgtttaactatagttatacgcaaagataactacagtctccctttcgtataactatagtcatacgaaagggaaactatagtcaaacgaagtaagaataacgaatgaaacaaatccgcgcaggcaatcggatagataaaagtgccgatataaaacaattctgattatgagtatacattacgacctttacgacacgcccgacattcagaagaaaggcgaagaacaaccgcttcatccccgtgttgttttcaacgggacgatcgatcaggaagaatttctggatcgtgttcacaaattcaccggaataagccgtagcctactggtaggtgccatgcagtctttccaaaatgaattgcgagatttgcttgcaaacggatggattgtagaactgggtgacatcggatatttttccgtatctctacaaggacctcccgtaatgaaaaagaaagatgtacatgcacaatccatcagcttgaaaaatatcaatttcagggcaggcaaacagttcaagaaagaagtgggccaacaaatgagaccggagcgcggagcatcgttcacccgccctcacgggaaaggacgcaatgaagaagaatgtctgaagctaatcaatgaacacctccaacgatttccctgcctgacccgtgcagattattgccgaatgacaggacatgacaaacaacgggcgatcaatgagttaaatatctttatcgaacgtggattattgatccgttatggagcgggtaaactggtagtatatgcgaaaaagacagaagagtaaataatcg

SEQ ID NO: 8290 - DNA, 1248 bp, Unknown
  gut microbiota DNA sequence
ggaggatttgttgcctcggttgactttggaagaaaaagtatcattaatgcaaaatgcgtcacctgctatccctcgactgggaattaaagaatatgagtggtggaatgaagcgttgcacggtgtgggacgtgccggattggctactgtttttccccagtctatcggtatgggagcttcttttaatgattcattattatatgaagtgttcaatgccacttccgatgaggctcgcgtaaaatcgcgtattttcggtgaaagcggcgtgctgaaacgctatcagggattaacattctggacaccgaatgtcaatatattccgtgaccctcgttggggacgcggtcaggaaacatacggtgaagacccttatctgacaggacaaatgggaatggctgtagtccgtggtttgcaaggaccggaagatgccggatatgataagctgcacgcatgtgccaagcactttgctgttcattcaggaccggagtggaaccggcatagttttgatgcggagaatatagatccccgggatttatgggaaacctatctgcctgcttttaaagatttggtacagaaagcgcatgtaaaggaagtgatgtgtgcctacaatcgttttgagggagagccttgttgtggcagcaatcgcctgttgatgcaaatattgcgggatgaatggggatacaaaggcattgtagtctctgactgtggagcgatctccgatttctatagaccgggaacgcatgggactcatccggataaggaacacgcttcggccgctgctgtgcggacaggtacagaccttgaatgtggaagtgaatatgcttcactggcggatgctgtaaaagccggtttgattgacgaaaaagaaatagatatttcattgaaacgtttgttgacagcacgttttgaactgggagaaatggacgaacaaccggcttggtcggaaattccggcctctgtgttgaatagtaaggaacatcaggcattggctttgcgtatggctcgtgaatcattggtgctcttgcagaataaaaacaacatcctgcctctgaatactaatctgaaagtagccgttatgggacctaatgccaatgactccgtgatgcagtggggaaattataacggtattccggcacatacggttaccttattggaagctgtccgtgccaaactaccggaaggacaaatcatatacgaaccgggttgtgaccgtgtggacggaaagacactccaaagcctgtttgatgaatgtag

SEQ ID NO: 8291 - DNA, 3362 bp, Unknown
  gut microbiota DNA sequence
cggtgaaatcatacacccttgttaccgatgaaaatatgcgcggaataaaataaattccttatatttgctattatcctaaccgtataaataacattcatttacatgagaaacatcttatacgcacaattattttttattctgattattgcatttgtcacttccacaaagtcttatgcttttaatgtggcaaaacacatatcaaatgttaacgggctgacgaataattcagtaaactgtattttggaagatgcagaacatacgatctggattgggacatgggatggactgaatgcatataatggaagagaaattacgacattcagatatagcaaaaacaatccgaactctataagtaataacgttatccgccagattatcgaatgtaagggcagtttatggatagcaacagataatggaatcaatcggttagataaacagacccgtcagataacaaggtattatttaagaacagataataaagtacccaatcaggaaaagtcttttattttaggaaagagtgcggcaggagatattatctgcctcataaaggggctggggttctttgtctataatgattctgaagatgagttcaatccgattaacacagactttgcaagtcatataaaggactattccgtgaatgattccgatcgtatgcttttccttttaaataatggaaataccgtgcatctgacttacaatcttctcgttaacggaggaaaacagagtgatttacgcacagtcgacatacagactcctgtagataagatatttctgtcgaaaggcagatttatcttaaacaaagataacaaacttttccttttaaatcccgactttacagtttcccaatgcattgagctggatagtagcaaacctgtatcgcaggttattttagcagagaacaagatgtacgtcagctttatagaagggggatgtattcattatgatttaaaaaagaatacttttacctacctgaacgaactatccagtcagttatcagtcttcactctttattccggtagtcagaacatattgtggataggaacggacggacaaggattaattcaactttatcattacgactctttatttgaaaccgttcacaccagtcaccctgtgagatgtttttgtgaagatgaagatggtaatattctgataggcacaaaaggaagcggaataaaactgttaaatcctgctacgaaggaattgacagattatctgaatgagagtaaaggattgatttccaattctgtctatgccttgagaagaaataaagcgaatgacatttttatcggaacggaaggaaccggaatcaatatattgaatgctgctacggggcgactggaaaagcttgagatacctgataaatacccacccttcaaggctgtgtacaacatttattttacgaacaatgattctcttttatgggtgggaacatcaggatatggtttaatcaaaataaatatttccagagagcaaggtcgttatcacgttaaaggattcaggcaatataattcgtcggataaaaatatctcattgaataacgatgttgtttatgccattacatccgatccggaagacaatatgttatggtttggcacacgtggcggaggcttgaactgtatcaatatgaaagataatagcataaaatcattggaagatatggacagtcggattttactgaccaataatgatgtattgtgcttactgcgtgatgataccaatatatggataggaacaagttatggactgaacgaattgaaaaaggaggagaatgattttcacctgatacaatatgccgacgagaaattgaataataaaacgattcatggaatattaaaagaccacgaaggaaagatatggatcagtaccaaccagggattgtctagcctgaatgtaaaaaacaataaaatagataattatactttgaatgacggattgcagaatgatgaattctcggatggagctttcttcaaggatcatcgtgatttcttgtactttggaggagtaagcgggtttagttatttcaatcctcgaaatatacatttgcgcgagttcaatcctccacttatattaagtagtttgaagatatataatacggtacaggacattaatgaacgtatcagaaaaggagtgttgaaacttagctatgaagaaagattcatgactttcaatttcatagccaaagactttattaataatgaaaactgtgaatatgcttatcgcttgaagaaccattcggatgattgggtggaaatgggtaataatccgaatattatctttacccaacttcctccgggtgagtaccagcttgaagtgaagagcacgaatggcgacaaagtatggggagacaacgtttatcgcttaactataaaagtaggttatccgtggtggcttagtgttcctgcattgattatctatgccatattgtgcattattatcttctatatcacaaagtctgttatcaaaaatcgcatacggttaagtcgccaggttcttatagcccaggtagagaaacggcatgaacagaagatttatgaatcccggctcaatttcttcactaatgtggcacatgaattctttacccccctaactttgatttatacacctgcacagcacttgttggaacaggacgggttagatggtagtacaaagaaatatctccaaataataaagaataatgccgaaaggatgcagaagctgattagtgagttgatggagtttcgtaaaaccaaatcgagcaatatggatttgcatcctgaaaatgtggacgtaaaatcattgatggaatatgcttccaacaattatgtggatatcctgaaagagaataaaatagacttcaaggtagaggctcatgatacgtcagagatctattccgaccggaatgctttggaaaaaattatattcaatttactgtcgaatgcgttcaaatatactcctcgttatggatatattcatgttgaaatatcacaaaatgaacctgataaaaccttatacttgctcgtaagaaattccggcaaggggttaaccgagcaacagatggcagagatatttgataagtataagatatttgatactcccaaattgggtaactctgtaagcaatggcataggtttaaatctaacaaagagtctggttgaattattaggcgggcagataagtgtaaatagtgaactgggaaaaagcgttgaactttcagtcgtgattccttctctaccatccgatcattcacttgttgtaacggatgaaaaagattcgttgcagaaagaaaagaacgggcaggatcacttatcccctcgcaaagatactgtcatactgatagtggaagatgaaaagaatatcagagacctgctgaaagatgt

SEQ ID NO: 8292 - DNA, 2970 bp, Unknown
  gut microbiota DNA sequence
ttttttctgtttctttgttttacttctttgcatataggcgatgcaaaagcattgcagataaaccagttcatagggaatgaactacactacacacgaggtaagaccaaaataccggtaactgtacccttatcggacccggcacgttatatttatgaatattaccgggccggacgtacaaaaggtaacttgtttatgaaccttcccacggatcaggatataaaccgggtattgaaaacaatagccggtaaagtaggaataacaaaggatatcagttcaaagaccgggcggcatacattcgctaccttgtattataagaaaacacatgatatcgtaacgctatctcaccttttgggacatagttctataactatgacaatggtttacgcacatgctctggaagatgaacgcgaagcgggaatacacgcctttgatgatatgttataactaaaagagtgaagggggaaccgtatttcccgcttccccctttcgcttttctactccaacgtataaacactccagtctatcgcctttttaagttcccagccttccttttgtgtctcctgtatatgtttcacggcaccggtgtaaaactcttgtagttgctgcatacttgcaaactcgtaaaacgtcgggttgtcttcttccccgagcttgaaagtaacaggaaggttttccccgcctgtctgcaaggcaagatcgtacgccgtcttataattcatctggttctccatggaaagccagactttcagaccgttccatatgtacccgctttcgatcgtgtcggttatcttccggttataccattcattaataaccgccttgatttctgccagtgcgggtagatgatcgaacgtctcttccatgtaactacgttggactccttctgctgtctctgtttcctggtaatcccacgtaatgcgccagattccccggcggcggttggtacatcttaccggttccgccttgctgtctgcataaattcgtatcatttcaagtaaaatgtataattatcaatcctttttcacttacttcaccttcgcaatgtgcttcaaaaggcagttctccgtctcttgccgctgattcacaaatgaaaagggtttcctcaaggctggtaaaatactttctctccttgccgtcgagttccagctttataacagtccggtttccgtttttcgtcggaacatccttttcataatcaagtacgatcacatccttgttcatcagttcgggcgacttgatccttgccccggtaaatcgtttccgtccgtctttaggcttgtacttgtagcccaaatcttttaattttttcattttctttcctgttagtttataaaataagttcttgcaatcagcatgttttgtaagcccgtaaaatgaagcggttaactcctgcctacgtttcttgcttttaaccttgtgcatcttgcgggcgaacttttgtttgttacgcttccttaaccgcacatgatccgggcgggttacatatcccagaaagtcgataccttcggtaatcgggaaaacggtatcattacttttaatctccaggcgggctttacgggcctgttcatgaatgatatccctaaccttccaaaggtatttcttgctaccagaaagcaccagaccgtcgtcacaataccggtaatagtgtgctactgcctcctgatcctttaaccggtgatccagataaatagacagaagcaaattacaaagcccctgcgatgatcttagtccgatactcacgcctttaggcatcatgcggatgcactcttccaggattccgatcaatattttatccttgaacatctttttcactgcatccagcaaaacgtcctggtctacgctctcatagaatttcgttatatcgaactggtacccgaacagggttccttcgggatcatcctttatatctttaacgatatactgtaaaaggtcatgcgttcccctgtttttaatggatgcggaagtagtccggataaaacgtactttcaaatgccggtccaccacattcataacggcgttaagaacgatcctgtcttccagggaaaccgattgtacgatccttactttcggcccgtcgtctacggtcatttcccgatatcctccgagcttgaaccgcccactcctgatccgctgcctgatcctctctaccgccttcggaacatccgccagtattctacgcccggcaaagctgcgctttcgtcttcttttgcgcaataccgtttttatggcgtcctctatattggagtcctcgacaatctcttctataatattatcttctctccacatgataattaaattagccttcaattccccgggccgggcttcttcgaaaaaagttcctaccaaaccccattgccctgcgctttgtttttcccctttccagccgtaaacggctgctgttggcgaggctcattcctcttggctccacgtcggggacacgtccccactgttgtacgccaatctttaaggcttatgcgctttttctttatcctaattgtttgcaagccgaacgccgatgttcgcattcgtgttcgatgaatcgttattcgcgttcgcatacgaaacaccgcctaacgcgttcgcgttgttgttcgaccgatacaccacacgagtgtatatgaggaaatccgcctttgtattttcaggaagcaccggcacccgtcttacttccggacgcccgcgctacccgcacaacgttttacgttgctatttttttattttaatcagcctgatttatggctttaaaggccgcgacgctgcccgcccagcgtattatgcccctgaaggcaagccgaacgccgatgcccgcatccgtgctcgatgaatcgctattcgcgcccgcacccgaaacaccgcccaacgcgtacgcgctgctgtacgaccgatacaccacacgagaaagaccggtacccacatagaacctatcgaaccaatgtgaggaagtggaaccgccttctttagctgcaatca

SEQ ID NO: 8293 - DNA, 680 bp, Unknown
  gut microbiota DNA sequence
ctactgtgcggggaatgatagcgtatttacattcttgcaggatgtctttgacgaaattctggcacttttcccttcccgctatattcatgtcggaggagatgaagcgcgaaagacgaactgggaaaaatgtccgctttgtcagaaacggatgagaaagcagcatttagccaatgaggaagacttgcaaggttatttcatgaagcgtatcagtgattatctgcgtaagaaaggacgcgaggtgattggctgggatgaattgacaaacagctcttttcttcccgaagagtccattattctcggttggcagggaatgggaacggctgccctgaaagctgctgaaaaaggacatcgtttcatcatgactccggcgcgtatcatgtacttgattcgctatcagggaccgcaatggtttgaaccggtaacgtattttggtaataataccctaaaagatgtttttgattacgaacctgtacagaaagactggaaaccggaatacgaatcattgctaatgggtatacaggcctgtatgtggacggaattctgtaataaaccggaagatgtggattatcttttgttccctcgtctggctgccttggcagaagtggcttggacagctgcaggaacgaaggactggactggatttttgaaacgaatggatgtatacaattcgcatattgcag

SEQ ID NO: 8294 - DNA, 1185 bp, Unknown
  gut microbiota DNA sequence
ctgttcggcttttcttttacaactttaccctcatcaccaccggattatgatcgctataattaagatccggcgagaagtaatccgcgctattcagttccggtgaatggagaatatagtcgattcttaacaaatgcttgaagtacttgaaagtatacatatacccatgtccgctcgtctgaaagccatcctgcaacttatcaccttttacagtgtgataaacatacgaagacggcagagagttaaagtcaccgcagactagagtaggatagggggaggcggctatcagttgcttgagaagatcagcttgtacggcccgtttccggaaattctcgtgtaaaccgtcgataagtcccagggcagcatgttccactctttgggaatcatccgtacgaagtcccttttccagtttgcgcttgttctggcttacttctgttgtttggagatgattgttgaacaggcggatggtgcgaccattgatttcaatatcacatgcaagactgcaatttttcgaatcaggatagatgataagatgctcctccttgataggataacggctgaaaacagccagttgcaacagattcttcccttcgggcgaagaaggaatataatgatacggccaattagaaagagctgcggatatactatcgatgccaaactcatcgttaatgccaaattcttggaaacagagaatatctgcttgcagatttctcatgtaagaagcaatctccttgcatgagtagccggtatgctcgtggttaaaggcatcgacgttgtaagtagcaaccgtcaacactcccggagtatatacattcattttaaccatcggtgacgaagccggactgaaaaaaggcgattgtaatacacagctcatatatccccaattgctgaatatagcaatcagagggatgaaaacccagcaccgccaacgaatcgtccagtagatagcagaagcaagattagccaataaaagtatcggtagtaccaaaccgatgaaaggcataaatttgaaactatccggtgcggcattgcctacgaaagcacccgcaatggtaactcctgccaaaatactggtcagcacgatggatatgtaataaaacagtctgtaaaaggctttcatctaatctaaattatttgctgattatatcactatcgtatacgtttgttataattatatacttgctgtaa

SEQ ID NO: 8295 - DNA, 30166 bp, Unknown
  gut microbiota DNA sequence
tagctataaaatcattgcaccccgcttcttcagctgctttcctgtcctgttcgtatgcaaaggcactttgagcaataataggaacagtggcagacagttcacggatgatttttgtagcttccagtccgtccagattcggcatcttgatatccatcaagataagatccggtttcacctcatcgaacatcgtgacagcttccattccgtcatgcgcacgtataagctgatggtctttacctagaatagcctccaataagtcgaagttactgtccgtatcttcggcaaccaaaatacaggcgtgccgtgtatttgcagaactgtcaacactcgaatctgcagttttcccggcagatgctattccagcaatgttcccttcaccattctctttctttgaagaatccacatttgcaggatttgcaatcgtgtatggtaaagtaaatgtaaacgtcgtccccttgccaaattcggagttgacggaaatctttccaccgagccgttcaacaatagacttacagatagataaccccaatcctgtgccctgcgcatgattgttcagctttgcaaaacgctcgaacacacgccccactttctccggttcaattcctgttccggtatccgttacgtggaatacaatctgattgtccaccagtttgtaaccataactgatacttccttccttcgtaaacttgacagcatttccaatcagatttgaaatcacctggaatacccggttcttgtccgtttcaatcatcagactttcgtccgaggattcatagacaaggcttactccttgcggagtacggaatatatgagcatcgtgcacttcctggcagagattatggagactagccggtccgaaggaaaactcgatggttcccgattcaatcttcgagaggtcgagaatctcgttgataagttgcaggagacgttcgttgttcgcgtttacgatgttataatacgtcttccgttcttccgcatcatcgctttcggcaatgagatgcgagaaacctacgatagcattcagcggcgtacgtatttcatgactcatattggcgaggaaggccgacttcaggctatcagacatttccgctttctctttcgacgactgaagttcccgttttatcatttccagttccgtgatgtcccattcgatgctgacgatgataggcgaagacaattcgtcaccgtccacccggattttccgtttgtcgaggataatcatgtttccgtttctgtcctttccttcagcagtccagtgcagaccttttccggtggtagccacctggatatcttcttgtctcttcttttcggctacgataggcgggtagaaatcgaagtcattcttgccgacagggtcgttcttataaagatcgcggttgtaggcctcccgattccggtaaatgtatcggaagtcgttgttgatttccttcactacaatcccggcagggagattgttgatggtcgtatccatgatttggttgagccgtttgatttgggcttcgtaccgaatcctctcggaaatatcatgggcaaacgaccagtaactttcttctccggaatcattggtcacgttgtacatcgtgccttcataagccaatatacctttattgattttagatgggtgatgagccacaaagttactgctgccaccgtgtatgacatctttgcaacgttcgttccaagcctcttgtgtaggcatatctgcagcgacattgtaaatctttaattgactgatgtcttcgttttctgaaataccatgattgtacaggaaacgacggttggcgaagatgatcgtgccatcgggcttggcggcaaagatactttctttggcgttgttgatggcatgagtcagtgtattgatgtcatttctgcgatgctgtatgtccgtgatgttctggatatagccttcgatgttgaaactaccgtcggagcgctgttcacgcagataagtctgtatacgcatatagaagatttctccgttcaggcggacacggtagctgatgctctccatgttgagctccctttcgttcacccgacaccattccataaaactctgacggtcttcttctacaatcagttccacatatttctcaatggcaaggttttgcacattttcctcgcacaaaacaccggtatatccaagataatgaaaaatattctgtttcgtattgtacgtccattgtcctatctgggctaccttttgaatagcccgcagggtgagatttgcctgttccaactgtctttttacgttgcttctttgcgtgatgtcgcgatattggcaaagcaccataccgtcataagggaacatgaggcatttgaagtaaaaagtttcgtctttcagcaccaacttgaagttcttgctgatgcttctttgttcttcgagtacaatctggaagatgggcatcaccctctctcttgtatattctggtaaaagctcaaatatattttttcctaaaagtatatcctcttgcagaaaccatagatcacaatgaggctcaatgtctacgcagactccatgcctgtcaaccaatagcattgtatctgctgtcagtttcaatattctttgtgcgttattcgcatcatgtaatattctgtccatgtctgttttttattagataatagagacttatgtctcctataaggataacaaaagattccggcatttgtttttacttttcggcgcgcttcgccttttcccaggctccgcttccttttttctttttcagataacggatgcctttcagcacattgacattcataaataggaaatagtaggggataaaaagcaacttgttttttatctgtttggtggatagataatatccccaatatcccaatccgtaaaaaagaacctgcatggcaagcagtactccgtagaatatcgcggaaccgcccaacagcagaatcgcaatattcagcgggaagagagcaaacaacaggaacggagtaatagaccatcgcaatacccggtgagatgtatattgaaagctaagtatcccgtagcggaaaggattcagtaacggacgaagtcgccagatggactgcaatcctccggcagcgatgcgcactttccgcttttcttcttcgcgcatatctgccgaaccgctttcgatggcgtaagcattggtgcaataagcaatggtataacctttcatggtgatccggagcgaaagaataaaatcatcgagcaacgtatccggttccattgcttcgaatagttcacgacgcacggcaaatagttcgcctgctgctcctacagcagagtagaggcgggcgtcaagtgctttcagtgttgattcgtatttccagtaaataccttccccaccggcagcggctccgtctttggtctgtacggcgatccgtttttcgccggccacgcagcccactttcgggtcttggaaagcaagtacgatttcccgtattgcctcccggtttaccatggtgttggcatccgtaaagacgacgagcggagtgtccaccagcgtcattccacgtgtcattgcggctgtcttaccctgtcgtaggggttggaagtgtacggtcgcttttccctgccaacgggtttgcagtcgttcgtttgtactgtcgtcgcttccgtctgtcacccatacgatatgcagtttgtccgcagggtagtccagttcaagactgttctccatcttttcgtctacaacatcttcttcgttgaatgctgtaatgaagagagtcacttccggcaaaccagcgtccgatgccggcaacgaacgcttcacaggtttcacgaaaagttctttcaacttgacgagaacgtaaagcacaattccgtagcccagataggtgtagaacacaatgaatagggcaagccagaaaataatttcaaggcagagggtaatggtttcgttcatagctgtatttatttagatattttctttcctttaaaataatcactatctaatataatatcagaaattttttctctatatattattcgttttttttctctttcggtgttcaaaatggaatcagggcaaagtaagctatttcctactcctctccattcagaatgaataccccccaaatcaagaagggttggaaataaatcagcttgcgtgataacataatcgcttgttttgtcgatcttttgtggagagtttacaatatacaatgggatttgaaaagaaacattatcttcttctttggatttaagccagtcatttgaaatggaatggtcactggctattataattagagaattgtggtaaagatgattttcttttaagaaattcaaatacttacctaagtatttatccatataatgcacattagatagataattttttaattcttctgaatatgtgtcagggaatggaatgaggtagtcttcaactgctttggtatatggagaatgcgttgatgatgtgaggataagtgagaaaaaaggttgtttgctatttttgtctatgcttgctgcatattcaaaaagaagcttatcatttaaccaattttctttataattactcaatgtatattcctttcgtgaatagagtttatcaaacccatattggatacatactccatcttgtctccatgttttagatgaagtaggaataaccattctacattcgattccaggtttttgtttctttaaaagtttgggcaaggacacgaaagtattattaaaataatcgtaaatggtaacaccttttgttttgggtataagtccgttgaggtatgtgaattgtccgtcgctcgattcgcctaattgtatcagagaagtcatgttattattgtagtatgctcctttttctactaatttgttgagggtaggagtaatttctattccatttatttttagatctgtagggaacgaaagaagggattctactataatgagaataatattttcttttggtggatattcaatactatattttgattcgtaaaagaatggttccagttttgccacttcctctgggttacagtcttgtttgttgtttgatgcacattgtataatggtcccataaattattccgaatttgaatatactttctgttggactatttttaaaagggtgaacatacttgtagtttaatgatgaccaatgtattgttgctgtagctattaatcctcctaataaaataaatgcaattcctaatatgtaaagggaaaagattcttcgtgtctttcttcttatttcagaataagctctatgaaattgtttataagataagatacttgcaagagttgttattagtattgtaatgtcagagaacctaatagttgcaaatacgttagctgatagtccgtcaagattgttgaattctccatataatattggaggcatatatgtgtagaagaatctactataagatacatttacaattaccagtattgtaatgatagtatatggaatgaaaaataaataagtcttttttccaattagataaagtggaataaagaataataggcatatatcgataaaagcatgaatgatattctccagatatgagaatggagtaagagaatatttatcaataagaattgagtagtgcatgtattgtaaattaatatagcatagtaatattaacgacaaggggaatgtaaattgtttgattaataattttatattcatatttctatctcactattttgtctgcaaatacttttaaatacgcttaaggtgccgccaatcataattatattgtttgttttcaactatgctattgaaataattcctttagcgactgttttttattcctcaaatatacaattggaaatttgcagaaagatataaaatttccctctgcagaagtagcatgtaatgtacttattgaatttccttccattagtcctatagcagtttttttctcaaaagcactaaaatatagcttatatttttcattgtccttaataagtgaacttcgatataaaccataggaataaaaagaacccagcattggagctttggataatatatattttttgttgttaaatgataagccgtcggaactggagtataatactaggttattagtatcataatcatatataactagataatatattttgtctatatatgctaaatcaatatgccaaggggtaacagaattgtcaggtagatgacatgtttcttttttgctccactttttcccatctgtagaaaaacttctacagatttctcttggcttttctatactgttcacataccacattacatatccattagtacctttatgtatcgcagggcttataaccatattacctgtttcattttttatgatagaggtatcttgtagatttatcatcacctctcggggagaccagtcttttccattgagagtatatttgcgtaatatataagtagcattatttttttgatggctgatgcggtaccagcactctaaagtatctttataaaagactaaatgtgggtctgaaaaataatctttatttataatattgttttcgtctaaatcatctattggattttgagagtcctcaaaatcgttccaatgtattccgtctttagatacatgcacacatggattttcccatcgttctctatatggaggcaatcctttccaatcaccatcctcacctaagggatatggagtttccgccatccagtatttatatccattccatccttccggaatgtatattactgatgggtgatagggttggttactaccttccggagtcttgataattaatggagcctgattatacttttgaaattgattatactggtatatatagtcaactaatattacacaaataacaactagaataatttttcttattattttcatttgcttatttgattaaattattgtctttatctttatattttttctttctggtgaataatcctccaataccttttaatcctttgataaaacgcactttgaagcttttaaacagtcctccatctgctcctactgttccatatccggttataacccgtgcttttgaagaatggataaagacgagttttccgtaaggtttcatcgctaaagccagtgagccgtcttcaccacgaatgatatctgtgcggaatcctaactgcttgcctaattctgttttgaatgcgaatgtcatgccgcgtacacaaagttccggacgctgtatggcttgaatgcgcaggtaaaagtctcttaatgattcataccaccataatccccatttagagtgttgctcatcaggaataaagctccaaaggctgaacgtgcagactacgtttggttgcattagtttttttacatgtgtcttgatgtaattgttcgggtacatggtatcggtgtcaatacagatatggtatgttccttttgcttggtttaatccgcattggcgggcatgtcccggtcctttcttaagctcattgaaataagtgactcccaactgttggagcacactttcagttcgatcggaagaattgttgttgacagccagaatttcaatcggaaagtcacagatgttgtcacaaagcgaccataagcaacttagcaaacgcttttcttcattatagcagatgagaatgacagatgctaagggttttttgttttccgataatttctgcaatttagtttttacgaaatctactgcttcctttggtgctgaatcgaaaggttgttcgtaaacttgcagatatttagtataccatttcataaatctttatttttttcaatgatactttcaaacaatgttttccattgttctgcgattggttcgatcctgaaacgttctatatccattcgagcttgccgtcccatttctcgtcgtatattttcgttttctatcagatagcagattttctctgctaatccctctatattaccgttttctactaatagtccgtttattccgtcgctgatgatatcacgcggtccgcaggggcatgtaaatgagacgggaggtactccacatgccattgcttctataataaccatgccaaatccctcataacgcgaagaaaggacgaagatagaacttttacagtacttatcgacaatatccggtgtgctatgctccagaatacaactggggctaattcctagttcgtagatttggttctgaagttgttcccgcataccatcaccatagatacggagaatccagtccgggtgttttttattgacaatgctccaagcagatattaaacggtcaaatcctttttgagggacatatctgcctacggcaatgacctgtttgggggtgttatccgattgttgttccggcaaaaacgggagtggattgtagattacggttacattattgagctctgtccattcggcagcatcttcatggctaaggacgacaaaacttttgagttgtcgcacctgcctgatgagttgccacatccagtattgcttgacggcacgctgaatgataccaggaagacagttgtcgctgaattcccggtaattggacttgttgaagtggatttctccaagcttaatgcttttgtctttcatcttattgatgaagtttatatcacgtcgtaagagagagatggtaatgtccggttcaatctcattgaggcatgtctccagcctttttttaaacaatttctgtttgctccaatatcggtgaattcgtttcggtaaggaaaggccatacaattcgtcatagttgatgtcgagctgatgggtggtgatggatggatacaatttatagtaaggttcttttccttttccatcggtcaatatgatgtgtatgtcataccctaaatgttctgcaaaatagtttgcttttagtgtaagtacacgttccattccactaggataatagagcgaggggatgcaataggctatttttacttttttattcatcggattacttttcaagtattgtatgctgtggtctgatgtccaattcatcgatgacttttttcatttgcgctgtccaggacaatggacggatagattctctaatattctgcggagtcatagtcagagacttttgaaagctgattaactgttgaatattaataggtgattcatctggtggtgctttccaaatgtaaggcatcttatcaaaatcttcgtcgatttctgaataagtaaatgccaatcctcgtgcagcatattcgcgattttttaaagttttgatatgtgtgataccactgcggtgtcggcctaaactaccgatagcaaaatctgcctgctcaaacatggcgtcaagttgctgatcatgctgtggtccatggaggataacataagattctagtttattatcacgaatgacgggaaggatttcttgcttttcacgttcgccggataatggtcccacgatatgaaaataaactttgtagtcaggattcgtacaataatattcagctaatccacggataagtcgatcgaatccatgccaatagtgtacttcagctactcctattaaatgtagctcatgtgtcgtgtcattcatttgtttcttcataggaatggcatcaaaatcaattccgttagatatgcggattgttcgttcgccaaagatatttttagcgtttgaaaaggtgactattccattaaggaaagaggccaggcgatgacgaaaacaacgatctgtgagccttttgaatttcataggccatgtgatgtactcttgatcgtaaggaaaagtcggtatctccatgaccacttttgctccttttttcttcatacgtttcaccatatttatggtgaaagggtttgcattatgatatgaacggatgtagacaaaatgtatattttcgcgaagtacgtagtttgctatgcagtttaggcccaaccgtttccgaattttcgcaaacactccttgtcccaattcagcaatcactgcattgtctgccatccagcggcgttcaccggaagggcttatgtcataataacataaacgaacatctaacccacattctttgagggcttttacctgatagtgtatttttttgctaattccgttggctttgtcgaagccgtggaatataaggaataaggctttcattggttgctcaaatctctatatattgtttattctgttctttttattatctcttacacaggatgcttcgcactttgccgataatgtcatactcatgcgtcatttgtatataaatgccaaagataataaaactaacgatacttttggctataattgtcacaaaaatattcatcccttccagtgcatactgcatgggaatgagggctaatgctatcaaaatgctaatgatgaacggagaaataagctgacgaatgaatggccacgcacttcgacggaaggttatccggtacatttgccagtaacattgtataaagttgatggagaacgtcaccacaatgcaactagccactgctgtcagcgttccgaaatagaagattccgagcagtatgcctgtcacgttgagcacagacgagaacactccgcatacaaataagctccgtgtatcgcctgccgcctgaaagatggaaccggacgaggagagtatgatctgaattcctacggacagggagagtagccgaaaaacgggtacggagggcagccattggactccaaaaataatcaacgttacttcctctgctgtaaagaagagcagcacgctaagaggcaatccgatgaaagcgaggaatcggagaatacgttcataagaggtggctagttttgctttgtcattttggaaatcactgaagatggggtgcattacaggagtgatgacctgggtgatgttttgcaagggaagcatcatcaggcgataggatttttcgtaatatccgaggtcggacatactcatgtatttgccaatcagtaatttgtccagattgcggctgaagtagttgatgacgttgaatagaaactggtaggcggaataggagaatatcttccggagcgccgtcagccccagcgtgaaacgcagtcgttgcggatagcgctggtaggagatgacgaatatgagtatgctggatattattgggttgataatcagtgcatataatcctgctccgcagagggcggcagtcacggctgccgcacctgcggaaatctggataacgaaactacggatagcgatgaatttgaattccttgttccgatagaatagtgctcccggcacgatggtggcggaggcaaagaatagattaacggacagcagttgacacagtgtccgcaggatttcgctttcgtaatagtcggcaatcatccatgaagctgcaaaaaacaagatgctgattccgatgccggtccatacggtaaacgagaaaatagttgatagttcatcttttgtcagtgatttgtgctgtatgatagcgggagatattcccatatcggtgaggaggctgaaaaaagcgatgattacggtggcaacggctacgattccgaagtcgtccggagataggaggcgggccagtattcctgctattacaagagaaatgacaatgccgctgtatttggccagtgcggtatagaacactcctgaaaagagttgatttttaatgttgctagccattgtcgaccgtttttttatggtttataaataggaatttgaaaagtaatgcccctatcgtttttgtcgatacatactttttatatttttgcaggcacaaccgtgcgagtttgatccgctccggtaattttagtgaatgtgcttgccacatggcagcgtcaagcatttgagataaatataaatcaataatttctttatttttatcttcggtagtctgtcttctaaagctaagaatctcttctgtgacgacaagatatccttttatgttccgcattgcgaatttactcgtcattgtagaatcttttctcatacgacgatgaaaaaaagttcgtttaatgcaagctgctttcgtgctttgtagataaagcaaggtagtaaacagttggtcttcgtgtacgatttcgggataaaatgatagattatgtttttctatcacgtttctatgaataaagtgcaggcaaacggaaggagtatattctttattctgtaattgaatttcaagtgcttcctggccggtatagattttgtcttctaatttctctgtatgtttgtaattcagtgttggagcattttcaacgttgttttcaaagaaaactaaagcatcaaaaaatacaaaatcaagtttttcttctttgcatttatgataacacaattccaaagcatcttcttccagcagatcgtcgctatccataaaatagatatattctccgtgtgcgtgtgagatccctctgttacgcgcaattgattgtccctgattcgcttgtgtatatatttgtatacgtttgtcagtgtcacccagtttttctactatacttaaacttttgtctgttgatccgtcatctacaactattatttccagttctttcaagctttgatacatcacgctttctactgcttgacgaacatatttttcagtgttatagacaggaatgacgacactgacttttatttcattatatttcatgcatttcgtattctgataaattattgatactggcagcagcattacaatctgctgttcaaatctctatatacttcggcatattgtttgcccactttatctatactcatgttttctagtgcataggtatagttcatttctccttttccccaagtagataactgccaggccattttcagtgcccgtatgatatcggctttatgattcggattgaaagtcggattgcctgtgttttttaatagttcgcctatattgccggtatttggtcctacgactatcttgtggaaaagaaaagcaagaggaatatttacggagtttagtgcatttctttcttggatgaatatcacgtcagaggcagacatataataagggaggtcgcactcgtctatcggttcgtcgttggctcccgcttgtagtctgaacatacggtttaacaacggcatgaggacatagtagccaattcgggaagcccatcgtttgaggatatttctgccatagttattgcgccttgaaaaggggcataagcgaggggctatcagtagtttccgttctttgtcccagtcgcggaacgctccgagcagcatacgtctttcttcccggttgcggaatttcccgaaggcggtgacgacgaatgcttcttgtggcaggttcagatattggcgcgcgcgctctatgctgatatcttctttgtaggtgtattggtagatgtggtacgggatgatgacgttcctgctgtcgggatatttttgtatgaattctgtctggctgtaatgtcccatgtgcactacggtgtcactctccgattcgattatgtcgtagacccggctgatgatatcatttgcatagtgggggtgaatgttgtgccgtgtgtatatgaaatgagttcctcgcgagcggaaaaaatcaatgcgttctttcaggcggcggatgacgtcggggtctttgcatgtccatcccaccagttcttccggccattggaaatggatgatgtcataagtcgtatccgattcccagaattctttttgggagtatcttacattgattccagccattctgatagcatcgcataagataggaacaaatagattgtcggtttctccgttttctctgaaaacgatcagtgcttttattgatgggctgtctgtttcgctatcactcattttttaagttttaaagacctttattacattgcaaatgtaataaaacttatgataagtttctccttttctgtgttttaattgcagtttaagttgctatttgaggaaatctgaaacaggtctaatgtttttataagccgtttttcttcttgggtataaggaatgtggtgactttcaatatattgcttgaggaagagacaagcatgtatgaaaatgtctgctttcatatagctggtgaaatttatgtaacggtagtaggaggcttcactgatgtcgatatgcacgcagaggtctactgtggctagccgtgacgttttcaagagcttttttatcagcattactctgttctggtaatgctcgttcactattttattttcttctatttcttccaacgtttggttgcgttttgtgtccatattgtttgggattattaataatttttggcaaaggtcggataaaaaatatataatccctctctcatttttgcgatagctggaataaaatacattttgcacctttgcgccccggaagtattaaatgtggaataataaatgataaatgaaaatgaagaaagatcagtatttcaatttggaggtaaatttgttgaatgacgacaatattgcctgtatgatgtcagagatgaatgccgcggaagcactcggaatttacgtgatgttgctgttgcatctgcgcactaaagatgcttatgaggcgtcgtgcaaaccggttttactgaaggccatggcccggcggtatgatgtggatgaagttgcggtggagcgggtacttcgcgaattcgatctcttcgaactggatgaggaacgacagatgtttcgttcttcttacttggatagggtgatgaaaagcttggaagagaagcggaaaatggacatcgaaaacggtaagaaaggagggcgtccgaaaaaggtggcaaaaagtgctgaaacgcccgtcagtaaagggagaaaacccactgaaaaccagaagaggagagaagaggagagtaaagaagaggagagtaaaggaagtgtttctgttgtaaacaataataggagtaatgtagaaacaccgtcgtctcttgtgagccgtttggcggatgaaggcaatcatggtccgttacaacccgtgttgccttgggaaaagttggtggaccaactttctactttccagtcatatatggaattggccgggcagcattccggtttgggaaagctttttgtagaccatcaaaaacttattctggaaattttcaaaaaacatatccgcctttatgataaaggagccggactgcttttcccggaggacgtgaaacggtatttttcaaattatatcgcggccggttccgttacttgccgcacgttgagggaaaccttgctgaaagagcttgagaatacggtcgacaaggatgtgaaccgctttgaaagcgtcgtcgacgggcggcgaacgtatctgggacatcttattccggctgatgcgccgccacgtcccgatgcatcggcggtgtgggatgatgtgaagaaaagatgggcgcattaatctggcagatgactggcttcgtccggcaggttgttgatgttcgtctagtaggtaacggaagttcgtccggcaggtggcagacactcgtccggcaggtaagtcctctgcgtgtgaatgattattttaaactattttttaattagaaaaaaggaaaaaaatatgagaaattttgccaactatgatgtcgacatccacggtaaatcgagtggagtcctcaagacgatttgtaaaaaatgtcttcctacccgcaagaataagcgcgaccgttcgctacgtgtcaacgtcgacacgggccactgtcactgttatcattgtggcgctgatttttatgttcccgatgatgtggaagagcgcaagaatgccgaacgtgtggcagcccgcaagcgtcgtgcagcagccattccgcagcattttcagcgtccagtgtttgatgcctcgaaaaccacgctttccgaagacacggagcgttggctggtggagacgcgttgcatcccgcagtccgtcatagccgccctacgcatcaccgaacaggaagaatttatgccgcaatccggcaaaaaggaacgttgcatctgcttcaactattttgaaggggaacaactgataaacaccaaatttcgcgctctcccgaaacttttcaaaatggtgcagggtgccgaactgattccctacaacatcgactccatcctggggcaaacctcctgcatcatccacgagggggaactggatgctgcttcttccatcgccgccggattcaaaagcgccatctccgtgccggccggagccaattcgaacctctcctggctcgaccgttttatggagacgcacttcgaggacctggaagaaatcatcattgccgttgatgctgattctgccggaatccggttgcgcaatgaactcatcaaccggctgggagctgaacgctgccgggtggtgacttacggtccggagtgtaaagatgccaacgagcatctctgcaaatatggtatcgccagtctccgtatcgccatcgaacaggcagcagaagttccgctcgaaggtatcttcaccgctgccgacttgcatgacgatctgcgggctcttttcgacaacggcttcggtcccggagcggaaacgggatgggaggagatggataagatctgcacgtatgaacgtgggcgaagtgtctacgtcaccggagttcccggtgcaggaaaatccgagtgggtggacgaattggtgttgcgtctctgcctgcggcatcaatggaaaatcgggttctttagcccggaaaatacccccatcgtctatcatctccgcaaactgattgagaaactcaccggacaccgttttcaaaacggctgtggcatgacggagggactccttgcgaactcggaagattttctgactgaaaacgtctctcatatttctctgaaaggtaatgtttctccggatcgtgtactggctaaggctcatgaactcgttgtccgccgtggctgccgcatcattgtcttcgacccgctcaaccgtttcgaccataacccgcagcctggacagacggaaacgcaatatatttcgaacctgttgaataaatttacagaatttgccgtgcaacataattgcctgctcgtggtcgtagtccatcctcgtaaaatgaaccgtaatcctgtcacgggcattacccctcgtgtggaaatgtacgacatcaacggctctgccgatttctataacaaagcggattacggtatcattgtggaacgtgacaaggaggttggtgccacacgcgtatacgtggacaaggtgaaattcaagcatcttggtgtcggtggaatggcatcctttgtctacgatcccgtaagcggacgatacctgccctgtgaagaatctcacgacccttctctctccgctgaccagcgtgtccgaaatacaatgttcgacaactcctgctggctacctgaaaaagagctgttttaaagtattaggtattaagtatcaagtattaagtattatgatgttatccattgttgcgatgcgtttaccatacttgatacctaatacttaatacttcaattagggttcttggagtacttcgacgatgagccttacttgtgcgggagtgtagtatctgctgcgtggattcatgccggtggccaggagccgttcttttagtccgggtgcagcttcaatccattcgttgaatcggtctactgcgctttgttgcaggatattggggaggtacaacaaggcgagctcgcctttcccataggtgcggtattggaatgttttttcttcttcttgttcggggagaatcttgttttttgttttcatttatagttgtgcctttagattgttatatttgaagtaaagttactcatttttagtggaataggcaaattttgagagcggatgttcgggcgtattcataaaagaattgatactaatagaataccgattcttgaaatttatcgtatctttgtttacgtttcacgttaaaagcatagaaaaaggatggaaggaatattcaggcgttatccgatagggatacagagtttcgagagactacgcaatgataattgtgtgtatattgataagacagagttgatttatcgtttggtaaatacacatacgacttattttcttagccgtccccgacgctttggaaagagtctgttagtttccactcttgaagcctatttctctggtaaaaaagacctgttcaaggggctgatgatggaacagttggagaaagactggacggtttatcccgtgttgcatattgatttcagtatcagtaagtatatgaatgcggggatgctgcgctccgctatcaacaatcgcttggtggaatgggaacgaatttacggatgtgacacgagcgaagacactttcagtctccgtctgaaaggtattatcaaacgtgcttacgagcagagcgggcgtcaggttgtgttacttgtagacgaatatgattctcctatgttggatagcaacaacaatgaggagttgcaagctgaaatacgtggcatcatgcgcgactttttcagtccgttgaaagcgcagggagaatatcttcgttttcttttcctgaccggtatcagtaaatttagtcagatgagcatctttagtgaattgaacaatcttcagaacataagtatgcaagatgcttatagtgccatttgcggtataacggaaaatgaattgcgtacacagttggaagaagatataagaaggatggccgaggcgaacggtgaaacgtatgatgaagcgtgtatacatttgaaacaacagtatgatgggtatcatttcagtgaaaatagtgaagacatttacaatccgtttagtttgtttaatgcatttgctcaaaagaaatatgccaatttctggttctctaccggcactcccactttcctgatagacatcttgcagcaaagcgatttcgatattcgtcaactggatggcgtttcggctactgccgagcagtttgatgcacctaccaatgtcattacagacccgcttccggtactttaccaaagcggttatctcactattaaagaatatgatcgggattttcagatctatacgttggcttatcctaacaaagaagttcggaaaggctttatcgaatcattaatgccggcttatgtgcatttgcctgctcgcgagaatacattttatgtagtatcgtttatcaaagacttacgggtcggcaatctggatcaatgtatggagcggatcaaatcatttttcgcctctatccccaatgatatgaataataaggaggagaaacactatcagaccatcttctacctcctgttccggttgatggggcaatatgtggatgcagaagtaaagagcgctgttggcagggctgatgttgtgataaagatgcaggaggctatctatgtatttgaattcaaagtagacggtactcctgaagaagcgttggcacagatcaatagtaagcagtatgcgattccttatcaggcagatcatcggaaagttatcaaagtgggagttaatttcgacagtagtacgcgaactattggagaatggatcattgaaaactagggaataatcttacatattcctacatatttccacatatttcggtataattcggtgtaatccgttttaatccggcataatccggtgtagtccggtgcaatccggtaagtcgtcaatgtgttgtcgtatctttgtttcatcaacagaaagggagaatgtacttcttttcgtagaaacaatttttaaatatggcaacagttacagttgtgcgctacaagcgcagaaaacggctcggtgatgataaatcaccgatgatgtatcttctcaagcctaaggctggagagtcgaaaatctattcaattgattcactggcacaggaaatcgagtctatcgggtcgctttcggtggaagacgtgtcgcatgtgatgaaatcctttgtccgtgcgatgaaaaaagtgcttgtggcagggaataaggtgaaagtggatggactgggtattttttataccacgctgacctgtccgggtgtggaacaggaaaaggattgtacggtgaaaaatatcactcgcatcaatctccgtttcaaagtcgacaactcattgcgtcttgccaatgacagcacggcaactactcgtggcggggataataacatgatgttcgaattgtatacggagaagaagtccgctgccggaggaaacggcggtgacggctccgatgatgatggtaaaggcgatgggggagaacccggtggtggtagcggtggaggagaagctccggatccggcagcataaaccgctttgattgactctgttctcaatttattaatttatcatctcaatctattaaaatgttagataaaattatcgaaatcatcatgacgattctgccttttctgggcagtagccgcaagaagcgccagatgatggcgcaagaagtgaaagagttcagtgaactagtgaaagaccagtatacttttctgatgcagcagttggagaaagtgttgaaggattatttcgaccttagttcgaaagtgaaagagatgcacgcggagattttctcgttgagaggacagctgacgcaagctgcggctctgcagtgtagtagcaaggaatgtgtgcaacgagtacagatggtcactgaaacggagggatgaatttatgcgaaccatcaacttgattgtgatccactgttccgccacaagggcggacagggattttacggaagatgatttggaagtgtgccaccgtcggcgtggtttcaacgggacggggtatcatttttatatccgtaaaaatggagatataaagaccacccgtgagattgaacgaatcggtgcgcacgcaaaaggacacaaccagaacagtattggcatttgttatgagggcggacttgactgccacggtcatcccgccgatacacgtaccgaatggcagattcattcgatgcgggtgctgatccttgcactcctgcgcgactatcccggttgccgggtgtgcggacatcgggatctaagtccggacctgaacggaaacggagagatcgaacccgaagagtggattaaagcgtgtccgtgcttcgaagtgaaagaattctgctcaaaaatgtaatgtactctatagaaagacttgtgaccgagtacataaatacttgtcacaagtcttttctcgttttatcatttcttaggttattttccggtgagttttacttagacacggggcagatgtttgataaagaaagttccttatatatactcaataacgattctgctgtgtttctccacgaaaacatctggctgcgcttaagcccgtattccacttgttgctggtagaatgtcccgtcattttctagtttcaagatttttgctgtgatatcttcgggactgaatggatcaaccaataaagccccatcacctgcaatttcgggcattgctgaagtatttcctgcaatgattggtgttccgcaagccatcgcttccagcatcgggataccgaaactttcgcgaagtgagggatatagaaatgcgaatgcaccactgtagagcgctgcaaggtcggtattctcaatgtagccggggaagctgagataacttttgatatccatcatcttttcttcttccaatatccggtcaatggcatcttctttaaggtcggcaatcagtaatggtaacttctttgccgattttttcaaatatccgctgtacgctttcagtactctcggagtattctttttcggatccgtgtttcctagaaaaaacagatattcgtctgcatcgatatatttccgggtaatttccggagctttgggctgcaaatggaaatgactgttgaacccgttatatacagctactaattgcttttccggcagatgtaacgcttcaagaatccgtttccgttcgaactgcgaaacggtaataattttctcgcacttggggagtatgcgcggaacgactaaccggcgataatgccatcccatctcttgataccacgacaggctggacgactggcgcttttccagatagattatatcgtgcaatgttagaaccagaggcacagggcagtgtagaggagccgtgttgctggtgcaatgcagcaaatcgggcttgatgctttttactgcacgcgggagtgctacctgttcccacaatggataagtagggcatttcagctcgatgatatgtacgttatcggaactttccagacacttgtcttcaccgggactgacaaaaatgaaatattcattttcatgatccattttttgtagttcccgaattgtttcaagagcaacaaaatccattccatgcttgttggggcggaaaatgcgctgtgcttcaatggctattttcatattctttcttttttagtggtggtgatgttttctcttttatataagttttttgtttctagggagtctcatttttttataaatattctcttgcttttcaagaaaattttctttaaaaatggccttctccatgttctgtatggataaattttttataagctcctttcaacttgaacaaattgccgatggtagtgagtgccagtattgggatttttataattgctttacccaatcgtttgtttagcagatttccaggtatgggcaatatcattgctactatctgggctatggataatatccaccattttatggctatcatccattcgtttccggaatcgcctttcagacttagccagataccgatggctgtgaaaataaatgtcagtccgaaaacacctgctatttggatcagtcttgggggtagcatccattgaattatcttgtcgcagtagtcaatgttaccttggcggattgctttctgtaatccggacaatgaactgcggagaatgccgaattgtgcagctatccagcgttttcgctgattgctgatggcttcttctttctgcgttttttcgtcataaattggtatttccggtaggtaggtggtgtgaatgcgctgttgcagaagaagtacttctaattccttgtcttcgcctgccgtttcaagaagtcggacgtttttccggaaccagtcggcttcaaaagccattcctgaaccggataatgcggctgaaagtcctagtgcattgtgtccgctgcggaagatgccattattaatttcttcgctgatgccatccagaacagaaatgtcagtattcagattttggccggttcggtgggcttgtatgcaccgcacaccgctgtcgaatgcacggtttaccgctgtcaggaagtgcggggaagtcagattatcggcgtccatgataactactacatcgtagggtattccgtcaatggcatccattgccattgtcagtgctttggctttggagctgtctttatagtcggctatcaacaatcggataggcaaggaacgcaagagctcgttggtggcagactgcatctggtcggagataacgatgatatcaaacatttctttcggatattcctgtctcaggaaactgcgtacggaagagacgattacccggtcttctttataagccgggaagagtatgacgaaacgtcgtagggtgcgggcttccggaaattcagggacccggtagaacttggaagcaatggcgtatagcaacagataacatacgcaaagcgcgaaaagtacaaaaagaatccagtcgacgatattcatagtatttggaatttatgacacaacgttttatttatcgggtgagacaacgctctttttgtcggatgacgggcgaagaagtccggagtttactccatagaatatggctgccgccaagtcgaaacgccctttgagtatgaaagccaaactattctttgtagcagctacggtgctctgataaataatggaggcgatgcggttgaaccctttcagattgcgccgggcatagaacaggcggttgcgtgtcagataataagtacgcaatttactaagttgcccagtgctctggctttctttatgaaaaatggtacagcagggatcgtaccacagttcatatccggcacgggtcatgcttgtgctccagtctagttcttcatagtagagaaaaaatatctcgggcatcattcctattttttcaatgacttcccgtttaaacatcattgctgccccatgcagatagggggtggtgtggggagtgtcgaatgttccatcgtctggacaatcgaagcccagcatatggttacgtagggtgatttgcgacaagggagtgaatccggcaaattgtatatgctggggtggaaatgcaaagcgtatcttgggggatacacctccaatctccggtcgactttcaaggcgttctacgagataggcgatatggtctgattcaatatatgtatcattattaataaggaatatgtatttaccttttgctacctggatgccgatattatttccaccggaaaaaccactgttctcattgctgcggatagcgacaacggtgggatacagttgatgtattttagctgcttcgttttcatgtgaagcattgtctacgacgatgatttcataacttacagaatgtattttattctgtagtgattctattagttcgcatgtgtctttgaatccgttgtagcagattgtgataaatgatatgtctggaatattgtttgtcatatttgttcgtcagtttttttgagtggctactagttctttttctttctcttcttcactgatgcgcttgtctatatgaggagcggcaaaacagagtgcgaatcctatatatacagtcaatggattgggatactgcattacgtcgttgacataggccgctatgaaataaccggcatccatacaaagccaggctgccactaatccgcgcaagctcttattgcgtactttaaacatcagtagccatgagcaccaagcgaatagaatgccatgtatacccagataaagaatgagtccgacaattcctgtttctacccatacgccgactaaccatgaatccggaggatagggcatttgctctttcggttcgaaatttccggttgaaagcccaacaccatatccgataggcttctttgccatcaattctttcattcgcatcctgttttcgacacgtacgaggtatgaagcatcttcggtaggatggaaagaggaacgcattttgtgaatgtattggtttccgctcccgatgttggtataatagaaaaatgcgaaaatgctgatagatatgaatatacctcccagtaatgctttccaattctttgctatgacggttatcatcagcatgccacccataagaacgccaatggcagagcgtgttccggagattcccattccataaatgccgcaaaaagcaataaaaaggaagtagatgcgtttccatctggagtcaacaaagaatgaggcaatggcaaaggtcacagtagacatggcagcatgaacaccataattggctgcatcagagaaacaagagaaatagcgaatgcctgaccagataatgtgagtacgtgcacctcccactacgtgtaagaaataaagatctttagaactgaatccatgattcttctgccaataaccttttagggtgaatatcaaaacaaatattgaccatataattaataatagttcaatatcttttttggtacgtattacgatcggaacgacgaatgcacagatcaagggggtgagagcgtatggagtgaggttaatattccaggctgccataacattgtttggattcagtatttccagtatataaaacaataaccagacaatgaagaaataggtcattatattttgtccgggtttccagttagtgcgctcgtcattgccgagttgtatcagacagatcgtagtaaacaataagataagcaccattgagaataatcctatcttgatgtttacgaacatacttgctgcgattagcgcgaactgtgcggcaagcaggaggtggaaagcggttactttattcgtcatcgtcctcgtctgctgcttctttggcttttcttctgagattgaatatgattttttctgttaatgataactgactgagacgatagccgattctacgcagtaatgtatggggtggaagttgtccggtaaagtcttctactgcgtcacggttcgcatttgtgaggcatatacggaatgggacatccgtcttactcagttgctgcgtaagttgttcgcaaagctgtttatcaatagttttccagccacggtctgccgaagctactagaatattggcgttggcatcatgtaacagagcactcggaatattgctggtcgataatggcggataagcaactatcagcacatcttctccttgcaaagtgtaaaagtctgtaatactcttggctagcagaaattgggtcgagtctgtattaaaatctactccataggtgataaacctggcatttaacatccggctttgcatatatccacagattaaatttcccaattcttcttctccggaattgtcactggtgctgaaaaggttgatgatgaatacgccgggagacttgcgcttagtcaggaagcgaagtagcgaattgctcaattcttttacggaaagctgaacataagtcttggtcagacctccatagcgagaggggcttgtattgggaatagcgcctattaccttaaacccggtgactcgcctggtacggctggcatctcgtaaagttctgtcaagcatttcgactagtaacaacaaagcgactatgatgagaaaactgactgcacaggcagctataacaatctgtttccgattggttgagttggacgaaatcggataagtcggctcgttgagtactttcaaagtggcagaagtcatttctagatttttctttctcagtaaggcttcattataactttgaagtacagtgaggtagttgcgttcggtgaaatttatcatgcgctctttttgcttgatggtagtacctaccggtgcgaaaaaaacatatcggtcattcaattcactgcgtgcattctgtacaatctgtaattcagctttggctttctcgtatagtagcgtttgttccagccattggtcgatgatattggttctcgaagcgccctctttggtatatttatggccgatataggaggatgttaagtcatttaattcttgtttgatttcagagagccgtttcttttcatttatcaaggtctgatcgtctgtttttgaggaaacagtcatcgcttcagcctccgatattctgccggtaatgctggaagcttctctcagtttgtctacaaattccatgttcttgagcacctgttttgcattactgtccatatgcttttctagttcttcaagcatggatttgctactattaaaagcaaaaagtgcgtcttgctctctcagctcgtattctttactgatggcggctatttctttggtctcgtcaatgtagttgataatgcgtttttctacattatactttgttaggtcttcttcttctaagtttagtttctttccgatgcgcttcaactcttcttcaaagtatttgattactttgtccgtctctccataacgaatgcgacgatattcttctacaaattcgtccattaagatactcactgtattgtagacgatgcctggatcaccggatgaatagctgatatccaacaaatcactggtcaatcgacgctgtactttgatgtttttcagggcattatagctataaaaagggtgattgtagtaaaataatccatagatatagttatctctatgtggacgcatatatttttccagattagctactgtcttatcttcactcgacttgtcgattagttttagaatttcagctccattcggactatttttcaagtgattgtaggtatagttatagctggaagcggtaataccgttattttctttatccgggttaccctgaataagaattcgtgcaaataatcgtagacatactctcttcaacgtactttcggcctgcatgatgctgatcaaattgtccattgagttttgtactgttgcccagtctgtgcgtttgtcactttctagattataacctgaagctacccctgtgtataatgtggcttttacatcatatcctccttgcatatgtcgtgtgtagtaaataaccagcaatgtgaagaaagtggttcctagcaatatcagccagcgatgacgaaatagggctcgtatgatagaaatgatatagttcatatcttaatcttttattttcgtatgatgggagtgcgtgaaataacttcgagtatcattaaactctttgttaattcgaacttgctattctcatatgcctcacgggcttgagattgcctttccttatctgtagataaatcggtagactcaatagtaccattggcaaagttcttttcagaaatttcgtattgcacattagctagcaccaaactttcactcctcatttgaagaactttcatctgcgaaattgccattgtgtacatttcaataatactttttttgatttcgtcatacttcatttctcgttctagttccgcactccgcagtgtgagtctttgccgactgacacgtcctttgaggtcgaataaatcgttcaatggaatacttagacctgcacctactgtgtaaccattttgcgcttgagtggagtaggtaagatatggggcgactgccacgtccgtataggtggactcattaccgaacattccgtattgatagctcccccgtaaactgaagaaacctagaaatgaccatttctctttttggagtaatttgcgctcaattctcgcctttacgtccgccatctcataaatggggctgttcttggcattttcgaataaaactgatagtggggggagaactattttactataatcttcttcacttagttgagaatagtcagacacttcttgtgcaactacacgggtggtagagatgaacagaagtaataaccccgaaaaaaaatatataaattgcttcataaaaaaatcctattatttgctcttgctgtgttatagcttgcgcaaatataaggattaatttcatttatgtgcagtcttttattatctattttacaatctttcttgtaaattgtgcacaatttgtcgcgtaaatggcgtcaaaaggcttctgtcatgttgaagtagaacaaattctgcttgttcaccatgtctctgccgaaatcaaggcgtacattcatacggggttgcacttcgatacgtaatcccaatccgaggttaggaagcacaccttctatcttgcccggagtgggtcccatgaatccgcatcctccccaggctacatatcctatatgacttaacatcttttttacccaagtgcttttgtccgtatttatcatctggcggtattcggccatcatgacatgcgaggacttgtcgcgaaactgtcccatgtagtaaccgcgaagatcgaagggggtcccactaagtacatattttgttaggggtacatctccgaatgcgtttttgctttgcactgtccaggctatcactttgcggcgtcctactgttttgtattggcggtaatcgatttccaaacggtaaaagttattatcactgccgaacgttttattgtacatcattccccggaagtcaaggtaagttccgctataagcattggcgggaatatcgcgtgtgtcatacgtcaacaggaagccgagtcccgaactgaaatttttgtatccgtgctccgtacctcctgccgcaatgtacgagggctcattaaccatcccggcagccggtttagttatcttgtcatagttcaaatcgacttgagggcctgcaaagaaattactttctcccaaacggaacaagaaccaggggtttacttgaatgccgctataacggtattcactggtatcttctccacgttcgtaatctttattggtggaatatccgatgccataaaaattctcgattgtatttttataagagaaggttccgaagatacggaaacggtcgcctttaaagaagagctgtggtttcgtcatcagattcaagccgcccttgaacatcaaggcgatggccattggcactactgaacgccgttgagtggtatcactcggattcatccgaaacgtcatcagtgcgctaccgcctactaacaaaccgaagtccggcgtataactgggaccacctaatatgttatagtgcaaattccgatttgccacgcgctggcgacgcaactcgcgcttggaaagggcaggaatggtgtctgatggggtgccttcaatttctgtaggagtagtatcactgatagaagttgtagacatttgcagttcatcgctttttactgccgtactatcagccgtagctgacatcatattgatggatggaagcatcatcaatattcctattatatatttcttcatatttctctctgaggaattcgactgcaaagaaaactattttattccgattagttttgatgttcttagataataaatctaaaaaagaatcgtatttttgcggaataagatgtttctcgatatgctgataaataaaactgcatgatttacccccatacaccaaaacaatatttgttagcatattatgatccgtcagcctattaattaattatttatatcaaatgaataaacagattttatcaatttttgttttatgtgctttttcttattctaatacttcgttaagtt

SEQ ID NO: 8296 - DNA, 667 bp, Unknown
  gut microbiota DNA sequence
gttaattgaaggcagcggtagtactgaactatggtacaaaaagagtgatgaaaaaaccaaaacactatacgatccatgtccggcaggctggagagtgccttataagatgaacacttatggtgaaataaacggagaagatgttgacaatggtatatatctttgccctaataatagttccataaaaatattttacccgtttggaggacatttaaatgccattaccggtcaatatccgggaggaagtttgtttgaatacaaaactgcacaaaatggttggctaggcagttatccggacaatcctaataatgcctatagttatcatatattctctgcaacattagtggacgaatatgacggaccattctttcccatcatgcctaacaatgcagacggcagatacttaggttatagcgtacgttgtgtaaaagaataaatcaccaaagaaaacaggtacatgaataaacacattattctattatttatcatattgtgcattggccttacaaaggccagtgcacaacatagtattaccggtaaggtgctagatgctactaaccaggagcctatcccatttgccagtgttactataaagaacgtcaagagcggaacaactacggacaataatggtaattttaccttaaaggtcaataataacgatattcttatc

SEQ ID NO: 8297 - DNA, 13198 bp, Unknown
  gut microbiota DNA sequence
tcagggcgcaaattcagattaccgttttttcgtagggcgttgccctacgctatataattaagccctttcagggcactccgcaaaattatcatttagttcatttcagtacagttttactccaattcaactactgattcgtataaacctgtgtttgaatactataatatatctgttccgtccttctatcagcacaccggcgtcagccccatcttcttagcccgctccagcatgaaagcatgagcagcctcatattcgttcggaatcactccatccaagatagcatcctttatagcactcttcaaaacaccgacttcacgacaaggttccaaaccgaaaatctccataatttcttctccactcacgggcggctggaagttacggacacggtctttctcctccaaatccttcagtttttgtcgaaccaactggaagttattcaggaaacgttgcttacgttccatattcttggaagtaatatccgcttcacagagcatcatcaagtcgtcaatgtcatctcccgcttcaaagagcagacggcgtacagccgagtctgtcaccacatcatccgcgataacaatcggacgcatgtgcaggctaaccagcttctgcacgtacttcatcttctcattcatcggcaacttcatcttgcggaagatattcggaatcatcttttcaccgataaaattatggttatggaacgtccatcccgctttaggttcccaacgtttcgtgacaggcttggcaatgtcatgcagcaaagcagcccagcgtaaccaaaggttatcagtcttcttgctgatattatccagcacttccaatgtatgataaaaattatccttatgcgaacgtccgttccgtgtttccactccctgcaaggcagcaaattccgggaaaatcaacggcagtaaaccgctacgttccaaatcaataaaaccttttgagggaatcggagacagaataatcttattcaattcgtccgcaatacgttcacgggagatgattccaatccgttctttattccggcaaagcgattcgaaagtatcatcgtcaatgtaaaagcccagctgcgtagcaaaacggatgcaacgcatcatgcgcaaaggatcatcactgaaagtgatatccgggtcgagcggagtgcgtattgtcttttccttcatatcctccatgcctccgaacgggtctaccagttcgccgaaacgtgccttattgagacatacggcaagagcattgatcgtgaaatcacgacggttctgatcgtcttccagcgtaccgtcttcaacaatcggtttgcgcgaatcccgttgataagactccttacgcgcacctacaaactctacttccgtacctctgtattttacttgtgctgtcccgaaattcttgaaaacagagacatgagcaccacgtcccaaccgttttccaagagcttctgccattgcaattccacttcctacaactactacatctatatctttagagggacgttgcagaaaaatatcacgaacgtagccacctaccacataacactccatgccgagcgcatcggccgtttcggctatctgtccgaagatgggttcgctaaaatgctgcttcaattcctcttgagtcaactctatcattctttttagttataagttttgaggggacaaaattacaaaaataagggatatatttgtatttttgccgctaataaagtgaatgaagaacagaacgatgaacagtgaatggcaaacggacactgcttattcatgtaaataataaaactagtaaatagaatttgtgatgaaaaaactgattatcctcttttgtggtacgctggcattagctgcctgcggaaatggccttgagaaaaaagccaatgaaaaactgatggttgccaaggctgcctacgaacgtggcgactatgaagaagctaagttgcaaattgacagtatcaagattttgtatcccaaagcgttcgaagcacgtaaggcgggacaggcactaatgcttgatgttgaaacaaaggcacagcaaaaaacacttgcttatctagacagcgcctttcaggcaaaaacgaaagaattcaacgccatcaaagacaaattcacactagaaaaagatgccgaatatcaacaagtaggcaactacctctggcctacacaaaccattgagaaaaacatgcaccgttcgtacctccgcttccaagtgaacgagcaaggcatcatgagtatgacctctatctattgcggtgccggcaatatccaccacaacaaagtaaaagtgattgctcctgacggcagttttgccgaaactccaagttccaaagacagctacgaaacgaccgatatgaacgagaaaatagaaaaagctgattacaaactgggagaagacggtaatgtaatcgaattcctacatctcaataaagacaaaaatatccgtgtggaatatatgggcgaccgtacctataaaacaacgatgagtcccaccgaccggctagccgcagccaatgtttatgaattagcgcaaatcctctccgcgatggaacagattaaaaaagaacaagaggaagctaacctgaaaatcggatttatcaataagaaaaaagaacggaaagcacaggaggaaattaccgattaataaaaaggaaactccatttagcaaaaagaaaacgatctgtgcggaaatgagataaatgatttttttatttttagacataagaacaaaagaacataaaggctgcgctttgaaaattatttttgttgcttattgaactgctattttattttttgttcttttgttcttctgtctgaattatattcccatttaactaaaaaccgtcaaaagagaagctatttagcagaaaaaaccatcggtcaacaataaaactgacgggaatagttgttatttttcataaacgacaactattcccgtcaaatgtataataagcctctttattctctgcgcggaagaaaaggcgtttcctggtatggagaaaaggcgtagtctgccatcataaaacggcgttgcctggtaggcaaaaacggcgtagcctccacatccttattttactcttctattcaattgattattagccttttcccgttttgattttccaacccgttttccggttgtcttctttttaccggctgcggactttgtctttccgacgaaaggattgttattttttttgattggcatagacaacacttatataaacagtacttataccttaattcttgttcctcttattctccttcgtaatattcgcccagaaaccagcgagccacaaaatcccagttttcctgtaatagttcctttccattctcaaacgggaactgtgcttctggcaacagttcatgttccattccatatttcaacaaatcaaatgggcacaaaccttcttcacaaaacagctcgtatgcttcctcttctgccagttcagcattgtagagcgggttgcgtttgtccgcaaaatatggggccacatcaggaccgatcaacagacctttcggattggcgaaaaccacgaagttatcaaactcttttaaatcaggcaacagagaatcttcttcatcctcccacttcaatgattgcacaaagaaaaatttcagcgcatcataagagtcaaagtacaaaagcggttcacctttacttgcttcaagaaaacgttctacgttggcaggcattttttctcccggcaaagctatcggcagaggcattctcttcttttgcatcaattccgtttccagcagccagtccgtcgcaaggtaatcactgataggagccaattcgaacgcagcatccaaacggttgtataatgcatctgcaaactccagcaaatctgcatccatcgggttctccactccgtcaaaatcattaccgaccggtgaattgattgcccacaaaaggaaaacaacatcttcacggttgatttcgtccggcagatattcgtccgtcaacgtgtagaaaggcaggtaacgtccgtagttttcctgatgccagtggataaactgacgccagtttcctccgtctgccacgcaatcttccaagtacaaagcacacgtcagagccacttgcttctggtcttcttccatgtctttcccaccatatatataagattcagccaccaatggcaatagctgattagcgaaatccagataccatttatccgtattcactacctttgcacgaccgtgagcgtccagccatgcctgcatataaattttctgttgtttcatactacaaacgtttcaaagccagtttgataaccttttctaccggagcatccggttcttccttcaagatagccagcaccaccttttgcgaaggcgcggcagcaaaaccgagcattgtcaatgcagacaccgcctcttcctgcacttccgcattggcaggttgcagcaacagacctgcggaagcacctccgccggcagacccactcatcgtttttatcttatctttcaggtcgacaatcacccgttgcgcagtcttcagcccgatacctttcaccgttttcagcatattcgcgttttcggtgctgattacgttcaccagttcggcaggtgagagcgccgagagaatcatacgtgccgtgtttcccccgattccggagacggaaatcaacaacaggaaaatctcccgctcctgcttctcggcaaatccgtaaagcacataagcgtcttcccgaatcgcctcgtgaatatatagcttacagtttttctttccctgaatagccgaataggtattcaaggatatattggcggcatatcccaccccgttacagtcaatcactgcggttgccggacttagttcggcaagttcgcctctaatatattctatcataacagggacaaagataaaacaatttcaccacagagggcacagaggccacagagttttttcgatgcaacacatcacaccctgatttgctttcatgcggaccggtattgcctgctagtgaaaaaaaataaaatattaaagcggatgaaccaaagttagtagtaaattgtttacttttgcaagtaaaagaaagaaatttgttcattaaaaccaagaaaagaatgaaaaaagtaagagctgccatcgttggttatggtaacatcggacattatgtactggaagcgcttcaggcggcacctgatttcgaaatagccggagtcgttcgtcgtgcaggagcagagaacaaaccggaagagttggcaaactatgcagtagtaaaggacataaaagagttgggggatgtagacgtagctattctttgcacgccaacccgcagcgttgagaaatatgcaaaagaatatctggcaatggggattaatacggtagacagtttcgatatccacactggtatcgtagacttacgccgcacactggatgctgctgccaaagaacataaagctgtatcgatcatctctgccggatgggatccgggaagcgactccatcgtacgcaccatgctcgaagcgattgctccgaaaggaatcacttacaccaacttcggtccgggtatgagcatgggacacacagtagccgtaaaagctatcgacggagtgaaagccgctctttccatgactattcctaccggcacgggaatccaccgccgcatggtgtacatcgaactgaaagacggatataaatttgaagaagtagctgctgccatcaaagcagacccttacttcgtgaatgatgaaacacacgtgaaactcgttccgagcgtagacgctctattggatatgggtcacggtgtaaatctcactcgcaaaggtgtatccggcaaaacacagaatcagttgttcgaatttaatatgcgcatcaataaccccgcactgacagcacaagtgctagtatgtgtggcacgtgcttcgatgaagcaacagccgggatgctacacaatggtagaaattcctgttatcgaccttctccccggcgaccgtgaagaatggatcggacatttggtataatatattttatacataaaataaaaattaaatagagaaaggcgatacacctttctctatttttttctttgtgaagatactacaaaaaacacaatgatgagaaaactattcattccatcaaccacgacggtttccaactggacaccgagcattgagtacgcatcaaatttttaaaaccgcagggagtatcatacgccgatatttcttaaaaaaaagaataaggcgaagaaacgctttacggaaaataaagtatctttgcgactcaatattttttgtgacttaacaattcaaaaaaaggaacattgaagaacaaacgatacaataatatagaagaatgggcaaatacccttagccatggaataggtattctgcttggaatcgtggccggatatttgttattggaaaaggcttccaaaaatatagagccgcagtgggcagttgcttgtgtatctgtctacttggcggggatgctttcttcttatgtcagctctacgtggtatcacggcagtcgtccgggaaagctgaaagagctgctccgtaaattcgatcatggagctatctatttgcacattgccggaacctatactccttttaccctgctcgttctgcggcatgccggcggatggggatggggaattttcgctttcgtctggctatcggctatcgccggtttcattcttagcttcaaaaaactgaaagaacatagcaatctcgaaacggcttgttacgtagggatgggcgcctgtatattggtagccatgaaacctttgttagaccatctgggagaactggaagccactaccgctttctggtggctgattggcggaggagtttcgtatatcgtgggagctgttttttattcgttgcgcaaaccatatatgcatgccactttccacttgttttgtctgggaggcagcatcgggcatatcattgccatctggctgattctataaggaatagtagggacaaaaaaaaggctatctatcccagacagccaatctttgttaaccttaaatctaatactatgaaaaacacagtacaaagatacggacttttcggttatctccaaattttcagggcaaagcagcctaacttataacacggtttaataaaaagcagaggtttgttaacgtttaacgcaataaagttaaaaattaacgaatcgtttattaactatttaaatgattgaatgatcggaccaagtaaaaattgttgttggcgagttccctgctaaaagatagtgacgctatatgatacaaatagcgacgctatatgacaatgataccgtcactatcccaagcatataccgtcactatcttttctacgtcaatcggagggcttacgtccacttatagcatataccaacaatgattgttgcctgatccgaattatctctaaagcctctctctaaagttgaaacaaacaaacagattcgccaattcgttatatataaaagagtaacttaaaacaattataaagcataaatttatggactgggaaaatcatcttataaagcacctgcaatggtcggactccattatcaaccgggaagccaaagaacacgtagcccgtgaaattgccgccacggcaaaagacggagatgtgataggagccggctccggctctacagtctatctaactctgttcgaactagcgcgacggattcgtgaagagcacttgcatattgaagtgattcccgcctctcaagaaatctcgatgacttgcatacagctaggcatcccacaaactatcctttggaacaagcgacccgactggacatttgacggagcggacgaagtagacccgcagcgaaacttgattaaaggacgtggcggagctatgttcaaagaaaaactgctcattagaagcagccgcaaaacgttcatcatcatcgatcccagcaagcgcgtcaatcagttgggaaataaatttcccattccggtagaggtctttccagactcactaacttatgtagagcatgagctgcaacgactgggtgcatcagaaatcgtcctgcgtccagcccacggcaaagacgggcctgtctttacagaaaatgggaatttcatcctcgacacccgttttaactatattgattcttcgctcgaagaacaactcaaaaccattaccggtgtcatagagagcggccttttcataggttatgatgtcgaagttatcatggcagagtaaaacaatgtaaactggaaaatcgcattttgtagagatatgaattaaatttgttctagtacaaataaatatagtatagctctgtatctatttcatttagcagaattgagttgtacgacacccgggtgtcatgcagcttgacacccgggtgtcagtatgctcaacacccgggtgtcggtatgtatgagacccgggtgtcgtacaagttattattacagtatcttgcattcttctttactataagtcataactccaatcactgtcagactacagcatttaatttataacccttaaaacacagatattacaacgtcatcaaacatatttttattcaaagccgaagataattgaaataatagtgaaaacactgggaaattcattaaaaattcgggtagaatattaccccccatctcaaaatcaatgagaaaaagagactactaaataaacaagaacagataaaggaaatttcaataaaagaaaccggaagaaccggacaatttgcgaaaatagaaacaaaacaactgaaaaacaataagatagaagaagaaaacacgaaaaaacaggaagaaaaaagatcaataagtcttagcagaacttggtacatttgcgattgtaaacttaccatcaatatcagtgatagtaccaagggtagtgccattcaccaatattgaagcacctacgacaggttgtccatcttcttcagaagtaaccaaaccggtaactctggatgtctgcgctgtcatcagacctatacctataaaaaggaaggtcattaagaacatcaattttcttttcataaattctctcttaaatttaacctataaacagattttttgtctctaacaggttgcaaagataatactaattatgacaaaccggaaaaagtgttacgtatttaactaaaaagtattattttgcaagcagttatccagcaaaaagcaacaaactataactatgaatattcaatttaatatattttaaaatagaatttctatcataaagatattgtccaaaaagatattttcaagataaaaagagcattatttcctcccaaatggtatctttttatcattttgcatctctcaaaagactaaagaactattaacaatgataaaaactgaaacgaccatgtaccaagttctgctaaaactttgcgcatttcttatgtaggaatgatttcgcaggacgtttccatcaaaccgggagtaattaaagtcgtattaaaaagtgacgcaaaggcactggatgaggttgtggtgacagccatgggtatctcgcgtgaaaagaaagcactgggttacgccgttcaggacgtaaaatcagatcagctgacgcaagctgccaactccaatctggcaggagcgctgcaaggtaaagtatccggtttggacgttaagccttcaagtggtatgccaggagcttcttcacagatcaccatccgtggtgcacgttccttctcgggtgacaacactccgctttacgttatcgacggaatgccggtaaccagtacgccggacgttagtacagacatacagaacaatggtagtgtgagcggagccgacttcgccaaccgtgcggtagatatcgaccctaatgatattgaaagtatcaacattttgaaaggacaggctgcttctgcactttatggtatccgtgcttccaatggtgtgattatcatcacaaccaaaagtggtaaagggctggaaaaaggcaaaccgcaggttagcttctcgtctaatgtcagcttcgatgtagtcggtcgtctgccggagttccagaaaacatacgcacaaggttcgggtggagtattcagcactacttcgggaacgtcttggggacctaaaatttccgaacttccaaacgacgcaacgtatggaggtaacacggataacgaatacacgcagaagttcggtaagcaacagggaaaatattatgttccccaacgtgcagcagccggtcttgacccgtgggctactccacaggcgtatgacaatgcaaaagacttcttcgacacaggaatcacttggagcaactcactgaatgtagcgcagatgctcgacaaaagctcctactctatctcattgggaaatacacatcaggacggtattatctcaagcactggtatggacagatataatgtaaaggttagcgccgacaccaaactgaccaacaactggagttccggatttacagctaactatatcactacttctatcgacaaggcagtgacttccggtaacggtctgttaagaacggtttacgcagctcctcccagctatgatcttgcagggattccaagtcacgtagacggtaacccgtacacacagaattctttccgtggtagctttgacaacgcttattgggcgatggaaaacaacaaattcacagaagataccaaccgtttcttcggaaatgtatacgcaagctatcagactgatttcggtacaactaaccacaagttgaacgcaaaatacatggtcggcgtggatgcttacaccactcactatgtagacagctacggatacggtagtaacacgggtggcggtcgcgggcaaatcgaaaactacggttggacgaacgctacatacaactctttgctgaccatcaactatgactggcgcatcaacgaggactggggattgaatgctgtattgggtaacgaaattatccaaagtaacagaaagaagtattatgaatatggtacgaactacaacttcccgggatggaaccacatcaacaacgccactactcaacagacagaggaagagacgtggaaaaaccgtacagtgggattcttcggtaacgtatcggcttcttacaaaaatatgctttatctgaccctcaccggacgtcaggactacgtatctaatatgccacgcaacaaccgctcgttcttctatccttctatttcggcaggcttcatcctgacggaactggatgcattgaaaaacaatgttgttaatcacgctaaattgagagtatcttatgcggaagtaggacaagcaggggatttcctcgaaaactactactcaactccgacctatggaggtggcttttacacactgactccgatcatgtatccgatgaaaggtactactgcctatactccgtactacacgattttcgacccgaaactgaaaccgcagaacacacgttcgtatgaagtgggtactgacgtgaacttcctcgataacttaatcacattcagttatacgtactcacgccagaatgtaaaagaccagatttttgaagtgcctttggcttcttctaccggtgccagcaaactgctcaccaacggtggtaagattcataccaacacgcacgaattcactctcggcttcaaccccatccggacgaaaaatatcaactgggattttgcattcaactggacgaagatcgataactacgtagatgaactggcaccgggtgtagaaaatatctctctgggtggttatgttactccgcaggtacgtgcttcggcaggtgagaaattccctgttatctatggtgtaggtttcaagagagatgaaaacggtaatcgtctggtagacgaaaacggtcttcctatcgctggtgaagcacaggtaatcggtaaggtttctccggacttcctgatgggtttcaacaccacattacgcttatggaagtgtacaatcagcgcagtactcgactggaaacagggtggccagatgtacagcagaacaaccggactggcagactactacggtgtcagcaagagaacggaaaaccgcgaaggtaccatcatcttcgacggatacaaaaccgatggaactaaaaatgatatcgctatcacaggtgcaaacgcacaacaggtattttacagccgcctgaacgatattgacgaatcttctgtatatgacaattctttcatcaaactgcgtgaagtggctgtcaactacaaaattcttcaaaaacgttcgatagaactttctgtaaacgcatttgccagaaatatcctgatctgggctcaattgcctgacctcgatccggaagccagtcagggtaacaacaacatggcaggagcatttgaagattattcaatgccgcagacagctagtttcggctttggtttcaacattaaattttaatctgcaagacaatgaaaaaatataaatcaataggaaaattgctggcagtttctttcttgactgctgccattgcttctgcttgtacggaagacgcaatggataaaatcaatgaaaaccctaacaatcctctggatgcgcctgcaaaatttttgattacagacttaggggtaagcactgcattcagcactgtgggaggggatttctcgctctattcttctgtttacattgaacacgaaacgggtatatccaaccagctttaccgggcggaagtacgtagcggagagcctacaacggctactacctacaacaacgcatggatcaacgtgtattcaaatatcaagaacgctaaaatcgttatcaagaagtgtgaagaagatccttcggaaaaaggaaacgtagtgacggaagcaattgctaaaatcctgctcgcttacaacggagcagtggctgccgatgtatttggaaatacaccgtacagccagactggtatcctcaatccggacggcacaccaatgtatatgcagcccaaaatagatacgcaggaaagcatttatcaggaagtgatgcagaatctggatgatgccatcactctgctgaataacggtactgccaaagatgcaggtctgtccggcgcagtcggttctaaagacttgatctacggttcaaacaccagtactcaagcaagtatgtggctcaagacagcttatgcgttaaaagcacgctatacaatgcgtctgctcaataaaagtgccaataagacaactgatcttcagaacattcttacttatgtgagcaaatcatttgctaatgcaagtgaagaatgtaaactggctgtttatgacgctgattcgcagttgaatccgctttggtcattcagctatagccgtaacagtttggcagccagtgccagtctgattgaaaagtttgttgagcgcaatgaccccagagcaccacaagcatttc

SEQ ID NO: 8298 - DNA, 877 bp, Unknown
  gut microbiota DNA sequence
tcttagtattatttgctgttcccagtctgtatttggacaaaaagccaatcaacaaccgaagacgagtggcaatcctgtattcccgggatggtatgccgatccggaaggagttgtatttggggatgaatactggatttatcctacgtattcggcgccttatgacgaacagactttcatggatgccttctcgtctaaagacctggtgaactggacaaagcactcgaaagtgttatcaaaagaaaatataagttggtttaaacgtgctttgtgggcacctgccgtgattcatgcgaatgataaatattatatatttttcggtgcgaatgatatccaaagcaataatgaactgggcggtattggtgtagctgtggccgacaatcctgccggaccatttaaagatgcgttaggcaaacctctgattgataaatttgtaaatggtgcgcaaccgatcgatcagtttgtttacaaagatgatgacggacaatattatatgtattatggtggctggggacattgtaatatggtgaaactggccccggacttgttgagtatcgtaccgtttgaagatggtaccctttataaggaagtaacccccgaaaaatatgtagagggaccttttatgttgaaacgtaacggaaaatactattttatgtggtcggaaggcggttggaccggaccggattattgtgttgcttatgccattgccgactcaccgttcggacccttcaaaagagaagcaaaaatattacagagagatcccaatattggaacaggtgccggccatcattcagttgtaaaagggccgggagaggatgaatggtacatcatttatcatcgccatccattgggtgaaacggatggaaacgctcgtgtgacc

SEQ ID NO: 8299 - DNA, 10621 bp, Unknown
  gut microbiota DNA sequence
ttgcgtgctttcaaacgcgtttatattccggcagggaaaactgaatcagtagctattcctcttaccggtgagaactttgaatggtttgatgcagagtcgaatacgatgcgtccgttggaaggtacttatgaattactgtatggaggaacttctgatagaaataagttgaaaacgattgtaatgaacgtacagtaataccgctttggaattttgtttatttttacagatagacaatccggatttatttattgaatgaataaagaaagaacgaccttgttcctttaaaaggaacgggtcgtttcttttaaaccaagcctccgtttcttttaaaccaacgggggctttcctttaaaggaaaatgaatatttgctaatatttgatattcagtcttttacatgatggggaataaaagtgctgaaataataggtaatgtagttatttatcttaccatttttctgttttgaggctttttgttacatcagaaaagaatcatgttacatgtctgtgataaatgtaacctgtatatagatgcctgtatcatgattgtacatatatgataaaaccgaatcgatacatttgcaaacactactatagaacagaaaattatagaaaataaaaagtgataatatgagaacattaaaattgattttgtcgggctggcaatccgtggcgcttgtcgtattttttatgctgttttttaatatggaggtgagtggcaagggtaaaataacgaaaaatgctcctgtctttacgcaatttatttatcagggggaggatgctatttatcaaaacaatcctttaaagccgggtgagttctataatcctattttgcagggttgctatcccgatccgagtataacgcggaaagggaatgattattatttagtgtgctcatcttttgccatgtttcccggggtgcctattttccattctaatgatctggtcaactggaaacaaatcggtcatgtgctggacagaacatcacaattaaaggttgaagattgtggtattagtgctggtgtatatgctcctgctataagatataatcccaataatgatacgttttatatgataaccactcaattttccggtggctttggaaatatggtggtaaagacaaagaatccggagaatggctggagtgatccgatcaaacttcaatttgaaggcattgatccttctcttttctttgatgataatggcaaggcatacgtggtacataatgatgctcctgctaaagcaaacgagcgttactcgggacaccgtgttataaaaatatgggattatgatgtggagaatgataaagtggttccggggacagaccggatcattgtaaacggtggcgtcaatatagaagaaaagccgatatggattgaagctcctcatatctataagaaagatggacgttattatttaatgtgtgcggaaggaggaaccggaggctggcatagcgaagtcatttttgtaagtgatcatccgaaaggaccttatcttccgtcaaataataatcctattttaactcaacgttattttcctgcaaatcgggcggataaagtagactgggctggtcatgcagacttagtggagggacccgacggaaaatattatggtgtatttttaggaatacgccccaatgagaagaacagagtgaataccggacgcgaaacttttattcttccggtggactggagcggaacatttcctgttttcgagaatgggcttatccctatgaaacctacattgaagatgccttcgggagttgagaaccaaacagggaaaaacggttatttgcctagtggcaactttgtctttaaggatgatttctccgataagacattagaccttagatggatcggtcttagaggtcctcgtgaagatttcgttgagatgaccgataaagggttgcggatcatcccttttacctcaaatatcaatgaagtgaaacctacttctaccttgttctaccgtcagcagcataatcaatttacagcggcagcaaccatggagtataaaccgaaaaatgagaaagattttgccggtataacatgttatcaaaatgaaagatatcactatgttttcggtatcactaaaaaggggaaagactattacctgatgctgcaaagaaccgagaaaggacaagcgagtgtcctgggtgaggtgaagatagaaacagagaaacctgtgacactgcaagtaacagccaatggagatgattatcgttttaattattcgattgatggcaagagtttcctaaatttaggaggaaccgtttccggcgatattctttctactaatgaggctggtggctttacaggagcaatgattggactgtatgcaacatctgttggttattaattagaaaccttatcattctataattatgaaaatacatcatctattttggggtatatgtttatgcttcagcaccaatatcttattcgcacagaactatcagaaaacatcgtccggtatcaaagccactgtgaatgcagtggatatagaagtacaattctttgcgcctgctgtggcgagagtaataaagtcaccggaaggtgttgcctatgaaaaacagagtctttctgtaattgccaaacctgaaaaggtgagtttcaaagctgatatacaagataataagattgtattgaataccagtgaactaagtgtcagtgtggacaccgggacgggaattgtttcttatttctcaaaggatggcaaatcgttattggcagagaaatccggtatgcagtttatcgatttcgatgatgccgggacaaaaacttatcaggtttatcaaccttttatattagataaagaggaagccatttatggtttgggacaattgcaaaatggaaagatgattcagcggaacatgactaaaaatctgatacagggaaatgtggaagatgtgtcacctttcttccagtctactaaaggatatggtgtgttttgggataactattcgccgactctttttacggacaacgaagttgaaacatctttccgttctgaagtaggtgactgtgttgactattatttcatgtacgggaagaatgccgatggcgtaatagcacaggtacgcagcttgaccgggtaagcaccgatgtttcctttatggacttatggttactggcaaagtaaagaaagatataagagccaggaggaagtggtagacgttgttcgtaaatatcgtgaattgggtgttcccttggatggtattattcaggattggcaatattgggggcataactatttgtggaatgcgatggatttccagaatccgactttcaatcatcctcaaaagatgattgaggatgtccatgcgatgaacgcacacatggctatatctatctggtcgtcattcggaccgatgaccaagccttatagagaattggataaaaaaggaatgttgtttaacttcactacctggccgcaatcgggattggagtcatggccccccaacatggaatatccttccggtgtaagagtgtatgatgcttacaatcccgaagcgcgtgatatttattggcaatatctgaatgatggaattttcaagctgggaatggatgcctggtggatggactctaccgaacccgatcatctggattggaagccggaggatatggataccaaaacctatctgggctcgttccgtaaggtgcgcaatgcttatccgttgatgactgtcggaggggtttacgaccatcagcgtgcagtgacttcggacaaacgtgtgtttattttaacccgttccggattcttggggcagcaacgttatggtgcaaatgtatggagtggtgatgtcgcttccacatgggagagttttagaaatcagattcctgccggattaaacttttctttgtgtggtatgcctcattggaatagtgatattggtggcttttttgcaggacattataataaaagctggaatgatgatagtgcttcgaaaaatccattgtatcaggagctttatgtgcgttggttgcagtttggaacgttcaatccgatgatgcgttcgcacgggacggatgtttatagggaaatctataagttcggaaagaagggtgagcctgtatatgatgctatcgagaagatgataggtttgcgttactctctgttgccttatatttattctacttcttgggaggtgagtaatcgccaatcgagttttatgcgcgctttgatgatggattttgtagatgacagaaaggtgtgggatatcaatgacgaatatatgtttggaaaatcgctccttgtggctccgattgctcatgcacaatatacgccggaagctgtggtaaaagtctccgaagaagagggatggaacagagatggagcgaaaaaaacaaaaactgatgttgctgtggatttcatggaaacgaaatctactaacatatacttaccggcaggaacgctatggtatgacttctggacgaacgagaaacacgaaggcggaaaggaaattaccaaagagactacactggatgttattccagtgtatgtaaaagcgggtagtattattcctgtcggtccacaagttcagtatgcaactgaaaaaccgtgggatcatcttgaattgaaggtatatgcgggtgcgaatggatacttcattttatatgaagatgaatttgataattataattacgaaaaaggagcatatacggaaattccaatctcttggaataatgcatctcgtaaattgacgataggggcaagaaaaggtgcgtatgagggaatgttgaagaaccgtaagtttactgtaacccttcaggatgggactcaaaaaagcgtcgattataatgggaaggcaatttctgtaaggttttgattataatagaatgtgtgattatgtcagtagaaaagaatctgaaaagtaggaatatgatgaagttttttatagtaatggctatgctattggggagtagcgttacaagtgcagaaaataaacagataacaagtcctgatggaaagttggtagtaacagtcgcagatatggatggaagaccttcttattctgttagttatgacaatgttctctttttgaagccatctccattggggatgattgcaaatataggagatttttcatcggggatgtcgctggaaaagaatgtttcaaccaataaaatagatgaaacatacgagttggcttctattaaaaagagcaaggttcgttatgtggccaatgaagctgtattttcgtttacacaacaagggaaaacaatttatgatgttatattccgcataagtaataacgatgttgcttttaaatataggatgtatccgcaaggtgagacactaagttgcgtgattaagaaagaagctacaggatttgcgtttcctgacggaaccaccacttttctttgtccgcaaagtaaaccgatgggaggatttgcccgtacttctccaagttatgagacgtcttatacggcagatgatgccgcagggaagaatggttggggagaaggatacacatttccctgtctattccgtaatggagataacggttgggtgcttgtttccgaaacgggagtaaatggtagatattgtgcaagccgtctgttgggacacaaagaaggggtgtataccattggatttccgcaagaaggtgaagcaaatgggaatggtacggtttctccggggatagcgttgccgggcgagacgccttggcgtactattactgtgggcaagactttggctccaatagtggagacaaccgttccttttgatgttgtaaaaccgctttattcggcaaaaggagagtatacgtatggccggggttcatggagctggattatcggtatggatggaagtactaattataaagagcaactccggtatattgatttttcggcagcaatggggtatcaatctgtgttggtggatgccttgtgggataaacaaataggacgtgataaaattgaagaattggctaaatatgggaaggacaaaggggtagctctttatttgtggtataattcgaatgggtattggaatgatgctccgcaaactccgagaggtattatggataatgcgatagccagacgtaaggagatgaaatggatgcaaagcattggtatccgtggaataaaagttgactttttcggaggtgacaagcaaatgactatgcagttgtatgaggatatcttgtcggatgcaaacgagtacggtcttttagttattttccatggatgtactttgcctcgtggctgggaacgtatgtatcctaacttcgcatcgagtgaggctgtattggctagtgaaaatcttcatttctctcaaggcagctgtgataatgaggcctttaatgctaccttgcacccgtttattcgtaatactgtgggtagcatggattttggaggtagtgcattgaacaaatattataatgcggataatgctccacggggaagccggcgggtaacatcagatgtctacgcactggctacggcggttctatttcagagtccggtacagcattttgctttggcaccgaataacctgaccgatgctccgtcgtgggctattgattttatgaaagaggttccaacgacttgggatgaggtacgtttcattgacggttatcctggtaaatacgttattcttgcccgtcgtcatggagacaaatggtatattgccggagtaaatgcgcagaaggaaacactgcaacttaaagttaatttgccgatgttctctaatggagaaaaggtgagactttttagtgatgataaggcgttgcagggcggtgtgaaacaaataggaataggaaagaaacaagaattgcaattgactattccttgcaatggtggagtattaataaccaaataactgtttaaactgatagaatatgaaaaacttgaatttttggggtgtattactcctgttggcaatgactgccgctacttcaggagtggcacaaaatcctattatccagacaaaatataccgctgatccggctccgatggtatataatgataccgttttcctttatacaactcatgatgaggatgatgccgaaggattcaaaatgttggactggttactttatacttccaccgatatggtcaattggaccgatcatggagcggtcgcttctctgaagagttttgattgggtgaaacgtgataacggtgcttgggcagaacaagtcatcgaacgtaatggcaaattttatatgtattgtccgattcacggtaatggtattggcgtattggtatccgactctccttacggcccttttaaagaccctttgaacaaaccgttggtttggcagaaggagcattggtacgacattgacccgaccgtatttattgatgatgacggacaagcgtatatgtattggggcaatccgaatgtttattatgtgaaactgaatgaggatatgatttcatattcgggggaaattgtacaagtggaaaataaaccggaacattaccaggaaggtccgtgggtgtataaacggaacgggcattattacatggctttcgcttcaacttgctgtccggaagggattggctatgctatgagcgaaaaagctaccggaccatggagtacaaaaggatatattatgcgtccaacagagcggagtagaggaaatcatcctggaattatcgattataaaggtagctcttatgtatttggcctaaattatgatttgcttcatttggaaacattggatcataaggaacgtcgttccacgtctgttgcaaaaatgcattataatccggatggaactattcaggaagttccttattggcaggagacgaaactggaacaggttgaaaactttaatccttaccgtagagtggaagctgaaacgatggcttggggatatggtcttaaagctgaaaatcataagaatggtggtttgtatataaccgatatcgataataatgaatatctgtgtgtgcgtggtgtcgactttggcaagaaaggagcaaagaaattcagtgtaagcgcagcttgtgttgaaaaaggcggaatgatagaaattcgtctggatagcactgaaggtccggtaatcggtagtgtcagtatatcaccgacaggaggactggatatatataaacagatgtcatgccggataaagaatgcaaagggtgtacatgatctttatttctgctttaaaggagagaaaggaaacaaacttttcaatctggattattgggaatttgaatagcttttattcaaaaaaaaataagattgtaatgtgcttataatcagtgtaattgtttggacgtgctacaaggggaaagatagatgtaacattgaaaatgaagatgttatttaggaaaagaagcccgtaacataattatgtttgtagttttatgaactggcatatctttgcagaaaagatcagtaattcatatttgattataaagaaaataagaagtattatgaagaatacacaggtaatacaattaatgtcaatcgtccggctctccatatttatgttggggataacaatgatgtcatgtaactcaaagaaagaacaacaattaccggctattggaaaatctgtggccctctttgattatttttcttataagggaaatgatgatttttatatttccaatcctctgtcaggtgaagactatttctataatcctattttgccgggatggtattctgatcctagtgtttgtacaaatggagaaggtgattatttcctagtaacatctacattcacttatttccccggtgttcctatttttcacagcaaagacttggtgaattggaaacagatagggcatgtgttgaaccgtgcttcgcaattagtgaatatggaaggacagaaagtgagtggcggtatttttgctccggctatttcttataatccgtataacaagacatattatatggtaacaaccaatgtcggagccggaaatttctttgttaagacgcaagacccgtttggtgaatggtcggaacccgtcatgttgccggaggtcggaggtattgatccttctttcttttttgatgaagatggtaaggcatatattgttaataatgatgaggctccggataataaacctgaatatagcggacaccgtactatacgcatacaagagtttgatgtgaaaacagataagacgatcggttcccgtaaaattcttgtaaacaaaggagctcaaccggcagacaaaccaatttggatagaaggtcctcatttatataagataaatggaaagtacttcttgatgtccgccgaaggtggaacgggaaactggcattcggaagtgattttccgtggtgattctccgatgggtaagtttcttccatggaaaaacaatccgattctgacgcaaagacatttgatttctgaccgtcctaattcggtaacctgtgctggtcatgcagacttgattcaaacaaaagagggagattggtgggctgtttttctggcttgtcgccctattaataatcagtttgagaatttgggacgtgaaacatttatgatgccggtgaaatggagtgaagacggattcccgtacatgacacaaggagatgatttagtacctatgattgtaaaacgtgaaggtgcgaaacgcgatacgacagttacttatggtaatttcgagttaatagagaactttgattctcctgtacttgatatgccatggatgactttaagagcttctgcttccgatttatattcattgacggaaacacccggatacctgaccttgaagtgtgcagatattagcgctacggaaaagaaaactccggcatttgtttctcgtcggttacaacatcataaatttgaatgtgctacccgtatgttgttcaatccttctaacgataaggaaacagccggaatgttattgtttaaagatgagacgcatcaatatttcttctgcttgaataaagtgggtgagaataaaaatatttctctgaaacaaatcggtgaaaaggaacagacattggcttcagatgaaatagacgcagatacaaatgaagtatatttgaaattagtatctcaaggaattggttacgatttctattattctattgatggtgaaaaaagctggaaactgctttgtaaagatgtagcccccagttatctctctactacaacggctggtggatttaccggtactacaattggattatacgctacttgcaaataattattttttttatataaatataatgctagtaattatgggtgatatttataatgatggctaacgcacttaaaaaaagaatgatgattagaaaacaatgtagttaattaacatcttaaactaatggtaatgaaaaatgtaacgaagaaaattcaaaagattccttacttgtttctccttatgttgtttagttttgtaacagcatcagcacagaaagggataacggtgaggggaacggttcttgacagtaatggtgagacaatcattggagcctcagtagttttaaagggtaataattcaataggtacgatttcagatatagatggaaattttgtattgaccgtacccaatgagaagtctacccttattgtttcgtatgtaggaatgaaaccacaggaggtaaaagtggtttccaaaggtctttttaaagtggtgttggaagatgatactaaacaactggaagaagtagtagttgtaggttacggacaacagaagaaagc

SEQ ID NO: 8300 - DNA, 2159 bp, Unknown
  gut microbiota DNA sequence
ctatactctcccacaggcatggactcgtaaagccggattgaacaaagtgcgtttttatatgtcgggctataatctttggacaatcacaggttattccggctacgatcctgaagtaaatatcgctaccggattaacaccgaatatcgatcatgatgcttatccgagaagccgtacttacacttttggcgtgcaactgacattttaacaattaatacagaagaactatgaataagaaattaatatattcggctattgtttgcctgggactgtcgatgtcttcctgcaatgactttctggatgtggaacctccggcaggatttactcccgagtatcttttcgagtcggaagatgaaatcaattctttgattactaatgtttattcggcaatgaccagagatcagatatatggaggagcatttgcctataatttaaatacgaatacagatgtagagatgtcttctttcagcaataatacggtcaactctgccggatcggacatcggttgttttgatgtgaagccttattggagcactctgaacgatacatggaatgctgtttattctgccattaatgtgtctaatgacatcattgagggaattgaaaactctcctttgtatttgcaaggcagagccagcgaacagttgaaacacatgtacggagagattaaaaccctccgggctacgctttatctggatttgatccgtacgtttggagatgtggtatttgttacaaaaccgtcagagtctactgatcactttcaggtaggagtgacagaccgcaacgagattctggagtttctgattgaagatctaatcagtgtggagccgggtatgaaatatgctgccgatctggattacggtgtggaacgtgcttccagagaatattgccagggattgatcgggctgctggctatgaatcgtggcggatggactttacgccctgataaagagattccgtccagtatcggctatatggaacgcggagagaatttcgagcattattatgatattgctattgaatatctgggtaaggtgattgatgaaggaaaacacgatctgaagcagagctatgaacaagtatgggcgaatgaatgtaagtggacaacggtcagcaatgacgatatcattttcgccgtgccgatgttgaaaggtactaccggacgctatgcttttaatatcggggtgacaatagcggagggaacccatgaatatgggcgtgccagaaactatgtaacgttctgtgggacgtatatcttctcttttgataagaatgatttgcgtcgtgacgtgacctgtgctccttataaatatgatgaagatttgaatcaggaactggatatggggattgccggtatgggcgtaggaaaatggtctaagctaaaaatggatgcgcctatgggttcttccagccagggtaatacaggtatcaatgctgttcgaatgagatttgcagatgtattattgctttatgcggaagctgtgaatgaacgtttcggacctcgcgaagatgcgaaagaggcattgaagcgcgtaagaagaagggcttttgacgcttcgttgtggacagacaaggtggaatcgtatgtagaaagccttggcagcgaagaaactttctttgaagcgttgatgaatgaacggaaatgggaattcggaggcgaaagtattcgcaaatatgatttggcgcgttggaacaagtatggagaagtgatatacaatttatacaacgaaatggtaaattgggggcttgtggctaacggacagtacatagaaggaattgatgatgtgccgactaatatttattataaagatataccggatccggtgaataccggtcgtacaattcttgatattcagggaattgatgaatatatgcatgctcgtccggctggatatgaagatcaggaatatgctatcagttggcgggtgctcgatagggagacacaggcttataagacagccgatgccatatcctggagtttcagaggatttatcaacatgaataatgaccggatagtgaaacccaccgatccattaagatacttgtgtccttatccgacgaaagtagtcaccgatcatcgcggattgatacagaactactacggtttttaattcaataattcaaaacactagtgtcccattaaaattgggacaaattaaaaa

SEQ ID NO: 8301 - DNA, 1373 bp, Unknown
  gut microbiota DNA sequence
ttactgctattccatcgaataagggagtacctttggcagatagttgtacgtatgtacttattgaacagtttatggataaaacgaaaggaacgttttgggtatccccccaaaatatatctggaaattcggctaatacttatatttattggcaacaggctcatgctattgatgtggtattgtattcttatgaacgtatcaaagataataatcctatattggctgcgacatataaagaatattttgaaagatggtttcaaaatcatggaaataattatcatcacgacaacaacgatcctacaggcttttcaaatccatatactgatgatatgtgttggattggtctgactttattgcgaatgtcagaagtgttagacgataataagtttgccgatacagccaagaggttgtatgacacttacattattacacgaaaatggacagatgataaaggaactggacttccttggaataatgaaaataattctaatgggcgaagccggaatatatgtaccaatgctcccggtgctttgattgctaccaaattgtataagaaatacaacgaagacaagtatttatcagatgctaaaatactccataaatttgcctacgacaataattacttaacattgggagatggtagaatagaggaacctcctttaacctatacgcaaggtacgtatggagaagcaagtaggcaattgtatcatattacaaatgaaaaatattatctgacatgtgcagaaaaagtaattagctatgtcacaaccagtgataggtgcttaactaatggcattttgcgtaatgaaggtccgtctatggaccaaagcatctttaaagctgttttgattccttatatagtcaatttggcattggatgaagctgctaatagtacacttaggcagaatctgattcttttcctgcgaaaaaatgcagaaacgttgagcgcaaacttgactcgtggaacttatccggaaatgtattgtaactattattggggatccatatttactggaaatattgcttctatgggcgcacaagcaagtggagcttctcttttggaaggtgttctccgattgaatacagcactagaaaataattagtcataagcatcactgtttaaaatgaagcaatgcaaccttaattattcatgcgaatcagttgttgaatgtaagttcttgtttttaagaaattctttgatgctaaaatagctttgatacgctccgtagaacagatagaaggtatattattgaatataagataaataataagcagcttgccattgtttaaatccagctcaatgacaggctgcttaaattataattacttatagtatgctgcagatatgattataaaagatctaatataatctaata

SEQ ID NO: 8302 - DNA, 2643 bp, Unknown
  gut microbiota DNA sequence
aagctgttcataatctatcgccttgtttgtatctatcgttccggttacttcgatacagataaagcggcggctgcccgtagggtcggtcagcaaatccttttggttgctcgttgcgatgaatgaagcataacggcgcatttcaagtacggcgtttccataaggtttgcgcatatttacaatcggtttttgcaggatatgtttcaggtatccttgttgggtggcgctgatctggtcgaactcgtcaatgttgatgagcgcaaaacgattgagatacaattcggcatccgtctttcgtgagaaatcgatgctgtccgtatagtatgcacgcatggcgggcgggatgaggctgcggcagaatgtcgatttacggcaaccttgcgggcctaccagcaggggcgaaacattattcgcatatttcttatctgtcccacgccagtgcatgaccatgttgagaaaccagcggtgaaacaagtctacccaatgcttgttttcgcagggaacggtttgtgccagtccgcggatacggtctttgccgtcccagacggggagatggtagaggaaatcttccaacggattgaatacggggatgcggttggagtagatataccggcttatgtccctgtcccatagcggaataccttcggcttgcgcatctagtgcgatactgttcagcacccgtttgttgataggattgaagtaaaaatggaatgagttccgttcgcggtattccacttctcccacttgggtgttgtaacggaattcgtagcgcctattcataaactcctctgtctggagtgacaggtactgttctttccctaagctgctcttctttccgaaccctttttgttcttcatatacattcttgaccaactggcggatgagcacctcttgacggcgcaggtaatagtggaaaatagtacgtttcaccgtttcctcttcgggaatgcccgaatggaagcagttgactgccagttgtgtcaccatagcctgaaagtcttcccctctttcgggtgcaccttcatcttccgcttcgtagatttcttcatgggtctttctcaaagccgcttcgaaaagcatgaatacagcgcgctccgtgtcatatcccggtacggcccgtgtcaacggtgacttttccgagcgtaccgcttcccgataagtcagttcttcgggcatccctgacggttgcgagagataaaacggaacggaatccggtctgtacataagttccgggtcgtatgacagtcgtgaatactgttccagactaggctctttgggtaaaatgctgaacggaatttgcggctgatagcatttcacggccaaacgataggcatgcgcgtgaaatatctccgcttcttctcttttctgtggaagcgaattgtcagggcgggtaaatttcgcccatattttcactgtccgtccgcttgaaccggtaaagacgcagtgagtctgcggctgttcccatgccaattgttttactaatgcaatctccgggccgcctgacaacggtccgacggtcagttctactattccgttataacttttcatttgttttccaccttccgccctgcggaattccgcagccggaagaatcttcggaagcttgtctgcttcgtagcagcgtgagtcgggcagggaatatcgcaacacttctctgaaagcggacacaggctgtgtctttgtttctgtccgtgtttttcctatccacgtttccatatccattgtagtcagcgcagtagttttgtccttgtctcttaattgagtgattttcatcttttgttttgttaataatattctgctaagttagtcatatttgcccgctcttgcaaataaacatggatattttatctgtttatcctttttatccgtacatttgtagaatttaataacaataaaaaccgataaacagcaatgaaagaaccattcgattattccatcgttccttatactttcggcttgtgtgcagccgaagaatgtccgcgtgccacgacttgtctgcggcatatcgccttagagtatgctccggcggagcgggttttcctgtcaataatgaaccccaaccggctgaaagcgatgaaaagtgcttgtgattattaccgttccaatgagaaagtgcgttatgcacgcggctttatgcgtacgattagtgctcttacggttcgtgtggcagatgcctttcgctatcgtatgattgaatatatgggtagaaagaactattatttgaaacgtaggggagacatgaaccttagtccggtcgaacaacggcggattattgccgtagccaaggaacttggcgttagtctggatgagtatttcgacggttacgtggaggattataactggggttagtcttgtatatctccttctctgaaaatctttagctacggtttcgctgtcgtttctctatatggaaactccagtgtccttagcgggaaacgctggtatctctagttggaaactctcgtttccatgcgcggaaactgtagtttcccgcctgggaaccggagttctgacgctggaaacgagcgcttcaatgataggaaaataaattttgatgcttggtgtgcaatatttcttcttaccgctgtgttgcagatacttttatctgcaacgtatctgcaacggtatctgcaacgctataattgt

SEQ ID NO: 8303 - DNA, 3358 bp, Unknown
  gut microbiota DNA sequence
gtttcagtctgatttcgacaagttgaatacaactcgaagtaatacaaagtaagatttacgacatacgcgggtaaaaggtgatgttagactttgatttggcggaaatgtacggaatagaaaacagggtgctaaaacaagctgttagacgtaatttaaaaaggttcgaaggtgaggactttatgtttgaactcacgagggacgaactttcaagatcacaaattgtgaccttgaacaaaggaagaggcagcaattttaaatatatgccttttgcttttacggaactaggcgtagcaatgcttagtagtgttctaaactctgatactgctattggaataaacaggggtataatgcgtgctttcgttgcggttcgtcagttactgttaaacccgccgaccgatccagtatatgaacttcaaaacgaagtcaaggaactaaaggagtacatagaggaagtatttgcagactataacgacatcaatgacgacactcggacgcagttagaattaataaatcagacgttagccgaattgcaggcgcaaaaggctttagcagataagccgcgtaatcctatcggcttcgttactcccaagaagaaagagtaaataggcggtccggttgttccgttggctattcgttggttgctctattggttacatggagagttggatgcaaatacaactatttagaaaaacttaatagctcaacagaaaggtggaagacaagtatcctggaaatttgaatctcataatgatttgtacctgttttattgtcatactgtcaggaatacattcaagtagatgaatatcaacgttctatcacctgacaataatcattgataataggctgacaataaaatatccagacttttattgtcagccttacttttatctcttatggtagctttataacctgataaacagtacctttataagtatgcttcgaaggaataccgcatttttgcagcaatctcccgaagtgatatactttgttatcagacaatgacataccgcttttcttcttcagataattcaatatttcgaccggagtaagaaattccccttcctctttcgtttgcgcagtcttgaaatactggtaaaacaattgcaacatagccggtgtctgctcaaactcacggttgttttccgtcataatctgctcatcctcactgtcaaaccagtagcgttcgccatgatgaatctcgtgcatggcttgtgcataaagctgttcataatctatcggctgtgtagtgtcgatgtttcccgtcacttcaatacaaatgaaacggcggcttcccgaaggatcagtcagcaaatccttctgattgcttgtgccgataaatgaagcataccgttgcaattcaagtaccgagcgaccgtgcggttttcggagattgaccacaggcttttgaagaatatgtttcagaaatccctgttgtggcagcgttatctggtcaaactcatcgatattgatgagcgcaaaccgattcagatacagttctgcatcccgtttatggctgaaatcaatgctgtctgtatagtaagcgcgaagcgcaggcggaatcatttcacggcagaaagttgatttatgagttccctgtcggcccactaatatgggcgacgtattgttcgcgtgcattttatctactcctctccaatgtgaaaccatattcaggaaccaacggtggaaaagcaattcccaatgcggatttttgcaaggaaccctgtttgccaaagcatgaatacggtctttgccgtcccaatgaggcagatggaacaggaactcttccaacggattgtagattggcacacggttggaatgtaagtatcggtctatgtccctgtcccatacgccaataccttcggattgggcatcaagcatgatactgttttgtgcccgtttgtcaataggatgaaaataaaactgaaacgagaaacgctcccggtattccacttccccgatctgcgtattataacggaactcataacggcgattcataaattcgtccatctgcaggctaaggcgttgctctttagtcaggcagctgcttttgggcactcccttacattccttatatacgtttcttatcatttcgcgtatcagcatcggattttttcttttgtaataacgcatgatggttcgtcgggttacctcctcttccgggatgccggagtagtaacaattttcggcaagcgggactactaaagtttgcaaatcatgatcgttccgatgccagtctgtttccatttcttcgaatgtcttccgcaatgccgcttcataaagcaatgctactgtatcttccgtgtcataccccggcagtgctcgattcagtggagatgtttcagtgctcgatttctcatgataagtcatctcgccgggcataccgatgggttgtgaaagatagaaaggtacaggagtgggacggtaaatcaagtccggatcataactaagacgtgagaattgttccagtttcggctcttttaatagaatgttgaagggaagttgaggctgataacatttaatggcgagccggtaagcatgtgcctgaaacacttcggcttcttccgttgtttgtggtaaagtgccgtccggacgggtgaagcaagtccatatcttgacgcttttaccacttgcacccataaaagccagcattgtttggggaagttcggctgccttttgtttcacgatttccacttctgtctttccggctagcggaccgatggtcagttctacaatgccattgtaggttttcattcgcttcactccgttcactcgtccgaaggctgctgcgggaatcactcgtggtagtttgttggcgagggaacaaggctcgtcgggtagaacaaaatgcagggcctgacgtaatccggttaccgggcggagcttggtttcttttttcattttttctatcagtaggtcgatgtctgtcacgcttagtgcctccgtatctccgttttccctgatttgtgtaatcttcatttttcttctcttgatatttaatgagagtaagtgtttgttattggtttcaaaggtacggataaggtacttgtaaaacaaactatttgcgctttatcgcgataaagaatgtgttttcttgttatactctattcaagaaggcggacttgagacattaacaagtaagtaaagatatgctcgccactgtgtattgttgcataaagacaccgttattcttacgttaacttaccggtattggtagttcgccacggccgtgacgagatcttcccacggccgtggtaggaattcgtcacggctgtggaaagaagtcaccacggccgtgggaaggtgaagataccggcactttagccgaacaatactgctgccttagctgaacaatactgtt

SEQ ID NO: 8304 - DNA, 4869 bp, Unknown
  gut microbiota DNA sequence
aatgaagcgggaaaataatccgaatgctgcctatttttatatggacatttactccacacgtgatttaaaagcattcatccagttacttgctcaaaatgtacttggagaattagatactctgtcccaaaacatactccggcaaatgactgctttcttcaaatcttgccgtcctattatcagcgctgacgaaagaagtggtatgcctaccgtaacattagactttgctcctacccacgctgaacaaacattgaaagaaatactcaattatatggtagcctcaaagaaacagtgttatcttgccattgatgaattccaacaaattacagaatatccggaaaaaggtgtagaagcattgctccgctctcatatccaattcatgcccaatgtacattttatcttttccggaagtaaaaagcatgtaatggaagaaatgtttacttctgcaaaacgtcctttttatcaaagtacccaaatcattgtattaacggaaatcccactggagaattattattcgttcgcacactcattctttgctaaggaaaaaagagagttgacactagaaacattttcttatttgtaccaacttgaaaacggacacacatggtacgtccaaagtatactcaaccgattgtatgaaaagaaaatcaaccccattgataaccgactggtagatagatgtataaacgacattttagatgaacaggaaaccatatatcaaagtaacctgactctactaaccaacaatcaagtagatttattgaaagctattgccacagaaggctgtataaaaagcataaatgccaatgacttcatcaaaaagcatcatttaaaaacgcccagcagcgttaacgtggcactaaaatccttactgaataaagaactgatatataatacaccagatgggtatattgtctatgaccgttttttcggaaaatggctgaaagatgcagtaatctaatacgcactagaaatgatttcgcgaaatcatttctcatattctcatactttacaggataatcatctgtaattcaaagcaataacactatgagaaatacttttcaaaaaggtgtttctcatagtattttgcctgaaatgtcataaaaaaccggtatttctcatactttcatcatgcatttctcataccggaactgctatataatacctacataataaatgtcaacccaacccgaagataaaaaaaaggcagccaactattatcagggtattacagcccccggtagtcccacatattgtgggaaaagattccctagctggagagaatttattccctcattttgagggaataaattcccataatataagagaatactttcccacaatatatgggattaccggaactaacggatatacttacccaagatcatagtattcgatatattcatcatattgaggcgtttctgtaactcccctctttcgaaaaagttcttgtatatacttttgttcctttggtttaatcaaccgttctttattgcaacaacgataatagatcgttttgccgaagtaggctatcatctgtcgcttgataacggtggcatcagcaagcggcacccgatccagcaaatgtttcattccccgtgcaaacaacaccggcttttcatcaataaagtaagtacagtcttcaccatcggaggtgacatgttcgggattaataaccattacagcagcccgctctttcggcattcggagagttacttgtcgtcgcagacatttgtccgcacgcaaacaatgtccattcaagcaatgagcgaagctaacgggcatagaattgtaatcgaaatctgttttcatgtgtgttatgtttagtggaaaagtggcctatttttataaaccgctacaaatgtatgaaaatagctggaggacaagaaataaatacactatttacttcaacacattgataaaatctttatatttgcctccaacatcaatacaggaacttataaaactatatctctcctgcaaaactataaaacagaataatcatgaagacaaaacatttacctggagcactactgtcatttctctatacaattatcttttttagctgtggaaataacgatgaaaaaaagatatattctttatccttcgaaaaagagtattacgaacgacctttgttaggaacaaccaatatcaccatcacaggtggaaacagggactacaccgtaactgtagaaaaaactgacattttaaatatagatgtagatttgtccagttcgataggaatgggaagcttaagggtcaccccaaaaaagaaaggagaaacaaaggtgaaaataaaagataatatcaccaacgaaacagttgatttaagaattaaaataacagacagctatttggcgtacgctatagaaaaaagtaatcatccggcactttccaatggcactgtagtttatctgattaacaatgaagctaaagaatgctattttttccgttatattgagtttagagacgaactatctcacactccaatagcaaaaggaacatacgactttttcaccaagttagaaagcggttccggcaactcgtctcctacatacgccataccttatttaacattaaattatacatctgacgaacaagaaaatttcacggatgcatcagttccccccacccctcacaaattaagatttgagctatacgatggggttacgagtgcaaatgctgtcctaaatcttatatcaagatttctaggtgtagattggaaagaacttgtagaaaaagctcttaccagaagcgaacatacaatagtacccacactaaaaacaacaattgacaatacagattataccataataggtatattaaatacctatcctgaaataccagagaatattttggaataacctcaaaagtatggaattgaaaataatgcaaagcatggaacgtatgaaaaaatagcgtatatttgcgagcaaaaaatataaaatgactatttataagcttcgcatattaccgctatttttactagttattgggcttacaacgcttacttcgggctgcaaaaagaaagacatgtcgctgaaactgaatgagccacgcaatattcgtggcgtcgtcagctataaacgttctttccctgatttgaatgacgcacatctggaagtagccaaaaagataggtatccgtccattggcagaccgggaagcagcagaagatatgaaagaaaagctaactcatattaccgacaatgagttttatgtagtagattcactgacacactctatcccctatctcgtaccgcgtgccagtgcactgctcgatacaatcggttccaatttcctcgattcattggcagccaaaggtctaaaccccaaccaggtaattattacttccgtactgcgtaccgaaaacgatgtgaaacgcctccgccgtcgcaacggaaatgcttccgccaactcggcacactgctttggagccacctttgatgtcagttggaaacgtttcaaaaaggtagaagacaaggatggaagaccgttacaggatgtaagtgccgatacactgaaacttgtcttgtccgaggttttaagagacctgcgacaagctgaaaaatgctacatcaaatatgaattgaagcaaggatgtttccatatcaccgcccgataaataccttttttcaaaatctttgactagcatatcataaaaccttcaaggtaaattttgtgttaagatggaaaacagctatctttgtatgaatccaacgctaaaagaatcagattatgagcaagctatatcctatcggcatacagaattttgaaagtctccgtaacgatggttatctctatgtagataaaaccagactcatttaccaattagtaaaaaccggccgttactattttcttagccgtccccgccgctttgggaagagtctgcttatatctactcttgaagcatactatcagggaaagaaagaactattcgaaggattggctatcgaacaactggaaaaagactggatcaaacatccgatattacaccttgatttaaatatcgagaaatatgatactcccgaaagtctggaccaaatactcaatgacaatctggaacattgggaaagcctgtatggcacacgcccgtcggaagtttccttttctttacgctttgcaggcatcatacagcgggcttacgaacagaccgggcaacgtgtcgttatccttgtggacgaatacgacaaacctatgctgcaagctatcggaaacgaagaactgcaaaaatatttccgaaacacactaaagcctttctatggggcattaaagagtaaagacggatgcatcaaactcggattccttacaggtgtcaccaaattcggaaaagtcagtgtattcagcgatctgaacaatctgattgatatttcaatggatgagcaatacgtggaactctgcggtatcacagagaaagaaatccacgacaatatggaagaagacctgcatattttagctgataagcagaaaatgacttatgaggaggtctgctccgaactgaaagaatgttacgatggttatcatttcgtagaaaattccataggaatatacaacccattcagtttactcaacacattctataagatgaaattcggtagttactggtttgagaccggcaccccgacttatttggtagaattactaaagaaatccaattataatctccaacgtatcacccatgaagaaacggatgcagatgtactgaacagcattgattcgacgtcccgaaatcctattccggttatctatcaaagtggatatcttacgatcaaaggattcgacaatcgctttggaatttatcgactgggatttcccaatcgggaagtagaagaaggttttgtaaaatacctccttccgttctataccaatatag

SEQ ID NO: 8305 - DNA, 5250 bp, Unknown
  gut microbiota DNA sequence
gataggcggctgtatcaccggaaccaacgccatataggagtaggcggacaccgcaatggctcccatcaggttaggtgctagcttggaagaaaggaaaatggccgtcgggccgtctgctccaccaatgataccgatagcgccggcttgcatcgggtcgaagcccatttccaatgcgatcatgtaagcaccgaagataccgaattgtgcagcagcaccgatcaacatcaatttcggattagagataagtgccgagaagtccgtcatggcaccgatacccaaaaagatgagtggcggataccagccggaggtcactccctgatacaatatattcaatacagaaccttcttcataaataccgactttcagcccggcatccatattaaaaggtatattaccgatcaacataccgaaaccgataggaatcagcaacattggttcgaactctttggctattgccaaatagatgaataccaagccaacgagaatcatgactacatgccctaccgtagcattggcaaagcctgtgtatgtccagaagtcggccaggttatttcctaaaaagtttataaagtctcccatattattcaataattacgaggtcattaccttcaagaacagagtctcccttgttgacgttgatggcagtaatcttaccgtccttatccgcattgatattgttttccatcttcatggcttccaatatgataatggtctgtcctttctttacagtatcgcctacattcactttgatgtcgaggatcacacccggcagcggagattttactcctgattttccggtagatggagcggtcggtttcactacttgagtaggagcagcaggagcattaggcatcgggcgtactgtcacgggtttcgcaacaggcttcggctgtttctccatttctactttatagtgtgtaccgttcacttctacatgagcgatgttgtcttcaatatctccgatggttactttatatgagttaccgttgattttatatttatattctttcatcgtttttactttttaaaaggtgacttactttctgggaggagtttcacgcaaagtgtaaatcttcgaactccatggtgagtagctgcgttttacgcgggtgatggtcagtaccgtttcttctacgtcgtgcacctcatcctgcatttcgtgtaatgccatagaaatagcagcgtatacttcgcccggagcctgtgacagttccttagcttcatgcttgtcaatgcctttagatttcatagcgttacgcttgctcaaattaacagctacttttcctacaatcttaaaagcaataaagagaagaatcaatccgcagaatactacgctcatggcagaaatggacattccaacgccatcagcatcgtgttcttcaaacttttccatcttggaattgctgtcaagagtcttgttgttggtgctcggagtcacgtatttgtcaccgcttccactttttacttcccattcagctgccccgtcgcttacacgagcgtatgattgattgggaccgagagtgcctgcgggcactacaatctggtcgagcaactttttgccggagtcgaacagaccaacccaattagctgtttccggattcagcttgaagctggtatggaaagtaccacggttaggttcgccatctgcccagaatagtgcatgttggcgtggtttcactaaggtaagtatatcacctttcgggataaaataagtaactgtatcgcccggttggctacttactttcagcaagcaagctgccaggtcggcgctaccgaatgatttattgaatatttcaatccatgcgctgtgcaatccgtaatcgtcctgaaaattactctgattgtctatcaggatttcgtttagcaccagcttattgttcgacttttgctctccacaagaagtcaaaccaatcagcaacagcaaagaaaggaatattccgattttggttttgttcataatcgttcttgttttaatgtgaaaagtaggattacaacggaatattaccatgcttcttagccggattactcaatttcttagtctgcaactgctgcaaagctcggatcacacggaaacgtgtgttgcgtggttcaatcacatcgtcaatgtagccatatttagctgcattgtaaggattggcgaacagtttcgtgtattctgcttctttctctgcaaggaattgagcagggttttcctgatctttggcttcgcgtgcgtacaatacttctactgctcctgcaccacccattactgcgatttcggcagtaggccatgcgtagttcatgtcaccgcgaagttgcttacagctcattacgatgtgagaaccaccgtaagatttacgcaatgtaatagtaaccttaggtacagtagcttcaccgtaagcatacaacagtttagcaccatgaaggataacgccattgtattcctgacctgttcccggaaggaatcccggtacgtctaccaacgatacgataggaatattgaatgcatcgcagaaacgaacaaaacgtgcgcctttacgagatgcgttgctgtcgagcacaccagccagatacttaggctgattagcaacgatacctaccgattggccgttgaagcgggcgaaaccgatgatgatattctttgcataatctttctggatttcaaggaattcaccgttgtccacaatagcgccgatcacttcgtacatgtcatacggtttagtagggctgtcggggataatatcgttcaaagaatcttccagacggtcgattgggtctgtgcaatctacataaggagcttcttcaaggttgttttgaggaatatagctcaacagtttgcgaatcagttcgaaaccttcttcttctgtttgggcggtgaaatgagtcacacccgatttagtggagtgaacgcttgcgccaccgaggttttcctggctaacgtcttcacctgtaacggtcttcaccactttcggtccggtgaggaacatataagaagtgccttccatcatcagtgtgaagtcggtcagagccggagaataaacagcaccaccggcacaaggaccgaagataccggaaatctgcggaataacacccgaagcaaggatgttgcgttggaagatttctgcataacctgccaaagcgttgataccttcctggatacgtgcaccacccgagtcgttgataccgatacaaggagcacccatcttcatggcctgatccataattttacaaatcttcaatgacattgtttctgacagtgaaccggcagaaacagtgaagtcctgtgcgaacacatataccagacgtccttcgattgtaccgcagccggttactacaccgtctcccggataatgttttttctccattccgaagttcgtgcatctgtgctcaacgaacatgtccatttcttcgaagctaccctcgtcaagcagcatagccagacgctcgcgtgctgtgtatttccctttttcatgttgcttcgcaattgctttttcaccgcctccgatacgtgctacggcacggcgttcaataagctctttaattttttcaagttgattactcatgagttcttgttggttttagagtttatgattaatgttcgcagagttctgtcaacacgcccaaagttgatttcgggtgaaggaaagcaatattcaaaccttcggcacccttgcggggagctttgtcgataaggcggatttctttgctttctgcttctgccaaagcattggctacgccatcttctacagcaaaggcaacgtgatgaacacctgcacctttgttttcaatgaatttggcaatagtactctccgggcaagtcggctccaacagttcaattttggtttcgcctacttttaaaaaagcagttcttactttctgatcttccactgtttcaatgttgtaacacttcagacctaatacattttcgtagtaaggaagggcttcttcgatgctttttacagcaatgcccagatgttcaatgtgtgaaatcttcataactatactttttttatttggttttaatcatgtgcttatatggcataaaacagcacaaagaaagacatttcttacctaataaagaaatatttctgcatttaattattggattattaaacagaaaaaatggtagggaaggagcatgaagagtcgttttgcaatcttgagattacatttagacataaaatttgactaagagtttgttcagccaattccaattgacacggaaccagcggcgggtactgctttgctttcctccgaatcggagaacgaaatcacgataaccgtgtttgcggaacggaagtcctacatccataaattccatgtgacggaatccccgttggcgggcgtcttccaatgccttccagacggccagcactcccggatactgaagtgcgtatgtctttctcattcctccggaaaaccaaaggtacgcgtcatctcccgagtagatacagacggaaccgccaatgattttctctttgtattttactacgaatatttttgcctgttgtcctttgattagcatatcgttcatgtgacggaaaaagtcgttggcagggaaatatctgcgtatgcgggaggaataaaccttgtgcagcatccgtgagaaatcatgtatttcttccacggtatgtgcctcctctactttggctccattcttgagtcctttttttatctgacggatgcgtgacgggctgaaccggtcttccgtctttttcatactgtgcagcgaattgcgtacccgcagccaattgacagggaaataatcattggcacggaaaacccggtaaccgaacatcgaattattgaggttccggaattcgatcaggacacagctacgcgatgcttcttgtgtgagatgttcgagcatatcgccaaaggtttcttctgccttttctttgttggtcgaaagcgactcatccagaaattcaccttcgctatatactacgcaatgcttcactaaagaggagggaagccactttttcgctttgcggatggcagcaagcaggcgtgccacaggtctgccgtcttctgttgccactattaataaaggagtatagcccggagtcgcttcataaatctgaaataactctttggaatggaaggcgttttttcccggcaattcaggaatgtccttcccatgataatatgtggttagtttaagtggcatctaggtacaaatttacactttttattctttattcaacaacaaaacggagaatttgttggagctgcttgatatatatagttgtaaaaaatgcacctttatat

SEQ ID NO: 8306 - DNA, 1007 bp, Unknown
  gut microbiota DNA sequence
aagggaacagtgaaacctcaagtagtgaagaaagataaccggattcctgcaaatacgattattaaggaaaaagtggataagagtactcctggtgcgatgatgagcggaagtactatttatcttgatttgaaaaaattgggtaaacatcctcacgccaaataatatagtattggcacaattattccgcacgatagcgtgaaagtctgtcgtgcggttttctctaatcatctaaattatcatagatatgagaagaaaatattttttatgtagtatggggaaatatgtatgtttcctggcagtatgtgtggtaatgttgtcgtcatgttataatgacgatgatttaaaaaactcaatttccggtctggaagatcgcatggataagttagaagcttctttgcaaagtgtacaaactgatatttccacattgaagacgctgactgatgctttatctcaaaataaatcaattgcttctgtgttggagaatgaagacggaagttatacaattaagttttcagataagacggaagtaactattcgtaatggtgaaaacggagaagatgctccgcaaataactgtgataaaaaacgaagaagatggcgtttattattggggaataaccagtacagacggcaagaagacattcctgaaagatggagaagggaatatgatgcccgtgacggctgctgctcctaaaattcgcattaatacgaatacaaaagagtgggaaatttcgacagacggtggaaagacttgggaacctacgggtgtgtatgcatccggcgaagggacgggggatacctctcttttcagtggagtaagtcaggatgatgattatgcatatttcactctgaaagatggcacaatattaaagttgtcgaaatctaaggaattgaaatgtgaaatattatcgggaaaacaatattttgcaaacggtgaggagaaactgatttcggttgaaatgagtggtatttctaagtataccgtaacgaagcctgacggttggaaag

SEQ ID NO: 8307 - DNA, 1639 bp, Unknown
  gut microbiota DNA sequence
acactgtccggaatgaatgatgtaactcacctctgcttcttcgatattccgctcatcagcaatattcctaatatggtttatctggcaccgacttgcaaagaggaatatcttgctatgctagaatggagcatccgccaaaatgaacaccctgttgcaatccgtgtaccggcaacagatgtaattacttgtggggaaccggtggagactgattatagtgttctcaatcgctataaagtaacgcatcgtggatcgaaagtagccattcttgctttaggttcgttctatggattgggacagtcggttgcatcacttctgaaagaaaaagccaatattgacgcaacactcatcaatccacgttacatcaccggtgtagacaacgaactgatggatgaactgaaagcagatcacgaattagtgattacgttggaagacggtgtattggatggcggtttcggtgaaaagattgcccgttattatggtgctacaaacatgaaagttctgaactttggagctaaaaaagaatttgttgaccgatatgatatacaggagtttctccgtgccaatcatctgacggatgaacagattgtagaagatatcacagcagtgatcggttaaaatcaaacccatgcactatatattcaggtaggttgatgtatacggtctttaaggacagttgcatcaacctacttccattttcattcaaatcagtcaacttattatttaaattcattatattcactattcagttcagtaattccccattcagttcagcaatcctttccgttcaaatcaataatcctttccgataattcaacggagtctgtcccgcatttcttttaaagaacttacaaaaaccggctgcatcactaaaccccagtttagcagcaatctcgccaaccgtaaatttggtagaactcaataaagtacgcgcttccattactaacaattcattaataaggctattgatagtcttacctgttccaagacgtacaatgcgtgccaggtactgttcactaatagccagtttatccgcataaaagctcacgaaatgttcttccctgaaattacgggtaacgagtgcatgaaattcttgcagaacatggtctttacgactgatctcttttttgataacggtctttcgggaaagaaaatctgctatatccaaaaacagagaattgcaggctgcctgtatacgccggaaaaggaaatgatgttcaatattcatcagatgcatcaatacttccagctccttatggatgatttgagcttcatactctgtcaactgaatcgtatattgcttattccgcctcatggttgccaacaggattgccgtgatttgtgtcagataagaatcgtccgtccgcatagattcggaaagggcgagagtgataaatttaatatcccgacttgaataaagatgttctgtgagataatttgctccatgaataagtaacatattcggttctatcgcaataaactctccattcagtagaatttccgaacggccttcaagaacgaatatcatataaagctcccgattgaaataacattcatttgccggataacttctgtctttatattcactccggaaacagactacctcctctttataatgaggaagttcaggatgctccttcaa

SEQ ID NO: 8308 - DNA, 6743 bp, Unknown
  gut microbiota DNA sequence
aaatacatgggcatccttatatagtgctatttatagcgccaacgactttatagagcgtctggaagttaaaatggttacatacaacctaaacgatcaagcactcgccactatgtatttagcggaagcaagagcattgagagcattgtattattttgagttggtacgttggtatggtaacattgcattaattactaacacatccgaatcatctaaaaatccgtcagagttcgttcaagcagatcctcgcgacgtatacaagttcattgaagaagatcttaaatttgctatcgaaaatttaccgtttgaatcggatgacaccctgcgtgctaacactcgattccgtttttctaaaggcggtgcattgggattgctgactcgtgtatatgtcacctgggcaggcgaacccattaaagataccgagaaatggaaacaagctgcattgacggcagagaagcttatcaactccggcaaacatcgtatgttggataattatgaacaactttgggaaaatacatgtaatggcacatgggatccggcggaaagtttaattgaggtaagtttctatgcaaattctgttactggtacagccagcgaagatccggtagggcgtattggtaaatggaatggagtcagagttaccgaaattccaggaacacgaggacgtaatgctgccaacgttaaagtagtacatacattcttcctagattggttaaacaaagaaaaaggagataaacgccgtgatctttccatagccaattacaaatatgatccagataaatctttctgggcaaaaccggaggaagtagacaaacctacagccggccaaaaaaataagcaaaattatactccggcaaaatgggacactgaaaagtatgtaaaagaatacaacttcttactgaataacgataaatcaaatgtcaattggtatatattacgctatgcagacgtattactcatgtatgcagaagcacttaacgaatggcatcatggtcccaacaatgcagcattagcagctcttaatatggttcgccgccgcggatatggacttccttataatgaagcaaatacaactgttgatttaaaatcaacatcatacgagggattccaagaatatatccggaatgaacgtgcctatgaacttgctttcgaaggaaatcgccgccaagatttaatacgttgggggatgtattatgaaacaatagtaaatacttatataaaattaattggttggtatccggaagcaaactatgtagcttaccaatatacccaaaagaataaacacgaactactccctatcccagctcgtgacatgagtttgatggaaaacttcaagcagaaccaaggatggggcgactaatctttttctgataaaaaattctataatttctctccaatatgcccaattaaaggcatattggagaaaattaaaacctttttcaacaaaatcaaaacttaaaaagcagagttcaaacaccttttggacaatcctgcaacggaaagttttgcctttcggttacttttgcatcagttacaaaacttctaaaaacaatcacttaaaatgaataacatgaaaatgaaacttgttctctttgcttcggttagtattgcactcgcgtcgtgccagacaaccccaaaggaagactacagttggataaaaaaaggactggatgtagcttctgcccaattacaactttctgctgaagaggttagtggtacgggaatgttaccacgctccatccgtaccggctatgacatggatttcctttgccgtcagttggaaagagattcgttaacattcaaagattcactacgcgcacagcccactgctgaccaactaggcaaacgtcgcctctgcaacgtttatgactggacgagtggtttcttccccggttcattgtggtatgcatacgaactgacaggaaacgatacactgaaaactcaagccatccaatatacaaatctactgaatccagtacgctattataaaggtacgcatgatttgggattcatggtcaactgcagctatggcaatgcagaacgtctttcacccaacgacaccattgctgctgtaatgagagaaactgccgataacctctgcggccgtttcaacgattctatcggcgctatccgttcatgggatttcggaacatggaacttcccggttattatcgacaatatgatgaacctcgatcttctgtttaatgtagcaaaagcgacaggtgacaataaatacaaagacattgctatcaagcatgctatgactaccatgaacaatcacttccgcccggattatacttgctggcatgtagtaagctacaacaacgacggaactgttgaacgcaagcaaactcaccaaggcaagaatgacgattcttcatgggcacgtggtcaagcatgggctgtatatggctacacagcttgctaccgtgaaacaaacgacagtactttcctgaacttcgctatcaaagtagctgatatgattatggatcgcgttaaaacagacgatgctatcccctattgggattatgatgcacctgtgactgaagaaactccacgtgacgcttctgccgcttctgttaccgcttcagcattgatcgaactaagcacaatggttcccgacggacaaaaatatctggattatgcggaaaagattctgaagagtttgtcaagcgacgcatatcttgcaaaagtgggtgacaatcaaggtttcattctgatgcactctgtcggctcactgcccaacggttctgaaatcgacactccactgaactatgctgactattactatctggaagcattgaagagattcatggaattgaagaagttgagggttgagcatggagagttgagaatgctccaataatacaaaagcaagagtgttctcaatcgtaaatagtaaatcgtaaaatcgtaaattatatcatgaataaaactttaaagtatatcgttctgctggcaatcgcttgttttgtaggcaaagctagtgcccaagaactgaaaagcgaagtattttcgcttcttaacctggactatccgggattggaaaaagtgaaagctttgcatcaggaaggtaaagatgaggatgctgccaaagcattattagactattaccgtgcacgtaccaatgtaaaaactccggatatcaatctgaacaaagtgactatcagcaaagaagaacagcagtgggcagatgacggattgaaacatacattcttcgtacataaaggttatcagccttcttacaactacggagaagacatcaactggcaatactggccggtgaaagacaatgaactccgttggcaattgcaccgccacaaatggttcactccgatgggaaaggcttatcgcatatccggtgacgagaaatatgctaaagaatgggcacatcagtatatcgactggattaaaaagaatccgttggtaaagatggacaaaaaagaatatgagctgttaagtgatggaaaaatcaaaggtgaaatagaaaacgtacgtttcgcatggcgcccgctggaagttagtaatcgtctgcaagaccagacttcacagttccagttattcctcccttctccttctttcactccggacttcctgacagaattcctggtaaactatcacaaacatgctatacatatccttgctaattattccgatcaaggtaaccacttgctgtttgaagctcaacgtatgatctacgccggtgctttcttccctgaattcaaagatgctccggcatggagaaaaagcggtatcgatattctgaaccgtgaaattcatgtacaggtatacgaagacggcggacagttcgaactcgacccacattatcatctggcagctattaacattttctgtaaagctttaggtatcgcagatgccaacggattccgtaaggaattccctcaagattatttggataccattgaaagcatgattatgttctacgcaaacatttctttccctgattataccaatccatgtttcagcgatgctaagttgacaacaaagaaagaaatggtgaaaaactacaaagcatggagtaaactattccccaaaaaccaggctatcaaatacttcgcaactgaaggtaaagaaggtgcattgccggattatatgtctaaaggattcttgaaatcaggtttctttgtattccgtaactcatggggaatggatgctacgcaaatggtagtaaaagctggtccgaaagcattctggcattgtcagccggataacggaacgtttgaactttggtttaacggcaagaatttgttcccggattctggttcgtatgtctatgccggtgaaggcgaagtgatggaacaacgcaactggcaccgtcagacttgtgttcacaacacagtaacgctgaacaacaagaacttggatacgacagaatctgtgactaaattgtggcaaccggaaggtgctatccaaactttagtgaccgaaaatcctagttacaagaacctgaaacaccgtcgttccgttttcttcgttgacaacacttactttgtcattgtagacgaaatgatcggtagcgccaaaggttccatcaatcttcactatcaaatgccaaaaggagaaattgccaacagccgcgaagacatgacgttcctgacacaatttgaagacggcagcaacatgaaactgcaatgtttcggtcccgacggtatgtcgatgaagaaagaaccgggttggtgctcaactgcttatcgcaaacgttacaaacgtatgaatgtatctttcaacgtgaagaaagacggcgaagaagctgtacgttacatcacagttatctacccagttaagaaaagcgcagatgcccctaaatttgcagctaagttcaagaacaaagcgttcgatgaaaacggactggaagtagaagtgaaagtaaacggaaagaaacagtcattaaaatacaaactataataaagctgactaaaaagtcggtcgcatctcaatttctcctccttccggaaggaagggaattggagatgcaaccggctttttagtcactccccttcatcattatggaaaactattacaccccctctgccctactcctcccactagctgcactaagtctcgcttcctgcggcaatcaaaagaaagaagagaccagacaaccgaacatcatcttcatgatgacggatgaccataccactcaagcaatgtcctgttacggaggaaatttgattcagactcctaacatggaccggattgccaacgaaggtatccgttttgacaactgctacgctgtcaacgctctttcaggaccttcacgcgcctgcatcctcaccggtaagttcagccacgagaatggttttaccgataacgccagtacgttcaacggagatcagcagacattccccaaactgcttcaacaagccggatatcagactgcaataattggtaaatggcatcttatcagtgaaccgcaaggattcgatcattggagcatccttagcggccaacacgaacaaggtgactattacgatcctgatttttgggaaaacgggaagcatattgtagaaaaaggatacgccacggatattattactgataaagccattgaattcctcgaaggtcgcgacaagaacaagcctttctgcatgatgtatcatcagaaagctccgcaccgcaactggatgcctgctccccgtcatctgggtatattcaacaatactactttcccggaaccggctaatctgttcgacgactatgaaggccgcggaagagcagcccgtgaacaggatatgtctatcgaacatacactgacaaacgactgggacctcaaattgctgactcgtgaagaaatgctgaaagataccaccaaccgtctttacagtgtatacaaacgtatgcctgttgaagttcaggataaatgggactctgtatatgccggacgcattgccgaataccgcaaaggtgacctgaaaggcaaatcattaatcagctggaaatatcagcaatatatgcgtgattatctggcgacagttctggcagtagacgaaaatatcggccgcctgctgaattatctcgaaaaaattggtgagctggacaacacaatcattgtctacacctccgaccaaggtttcttccttggcgaacatggctggtttgacaaacgcttcatgtatgaagaatgtcaacgcatgccgcttattatccgttatccgaaagcaattaaagcaggaagtaccagtaatgccatcagcatgaatgtggactttgctcctactttcctcgactttgccggaatagagattccatcggatatccaaggagcctccctgaaaccggtattggtgaacgaaggcaaaactcctgccgattggcgcaaagcagcttattatcattactacgaataccctgctgaacattctgtgaaacgtcattatggtattcgcacacaagacttcaaattgattcatttctacaacgacatcgacgaatgggaaatgtatgacatgaaagctgacccaagagaaatgaacaatgtcttcggcaaaccggaatatgctgaaaaacaaaaagagctgatgcaactgcttcaggaaactcaaaaacagtataaagatacagacccggatgaaaaggaaaaggttcttttcaaaggtgacagaagactgatgaaaaatcgctaaatgattattttgcggagtgccctgaaagggcttaattatatagcgtagggcaacgccctacgtaaaaacgacaatctgaatttgcgccctgaaagggcataa

SEQ ID NO: 8309 - DNA, 5568 bp, Unknown
  gut microbiota DNA sequence
caatcccccaaggtttcagactgagcctaaaacacaagctattcaacgaccaacacgataagcattaaaatagtcaatataacgaataaaataagattaatgaattctatatacgctgatcccctatatacttcaattttataaggatatacaaaaacgacgacttcagagtcacgaaagaaaagccccgaaagatgtctctttcggggcttttcttcgttggactaccaagattcgaacttggacaaacagaaccaaaacctgttgtgctaccattacaccatagtccaaacttatgtgctttctgttaaaaagcggtgcaaagatagaggtttgcaagcaaacctccaaatatttcgttcacttttttacattctatcgagtgaatcgtgcattattactttgcaatcagcaaaaaatagttctttttaccgcgctgaacaagcagatatttctcatcgagcaagtcagcagttgtgattacctgatcaaagaccgttagtttctctttgttcaacgaaacgccaccgccttgaaccaacttacgcatctcacctttcgaagcaaatacagccgcattatcgacgaacaaatctactgccttcactccttctgccaacgcatcacgggaaatctcaaattggggtactccttcaaatacagccagcaatgtatcctcgtccaatttgcgcaaagcgtcggaagtagcattaccaaacaaaatattggatgcgtcaaccgctgcgttataatcttcttccgagtgaaccatcacagttacttctttagccagacgtttctgaaggagacgcaagtgcggagcagcctgatgttcggcaatcagtgcttcaatttcttctttttcgatagaagtgaagattttgatataacgctcggcatcggagtcgcttacattcagccagaattgatagaacttgtaaggtgaagtatagcgagggtccagccagatatttccggattctgttttaccaaacttaccgccgtcagcttttgtaatcagcgggcaagtcagtgcgaacacctctcccccattggtacggcggatcaattcggcaccggtagtaatgtttccccattggtcggaaccacccatctgaagcttacagccctttgtttcatacaaatgaaggaagtcatatccttgaagcaactgataagtgaactcggtaaatgacaatccatcacgcgcttcaccattcagacggcgttttacagagtcttttgccatcatataattcacagtaatgtgcttacctacttcgcgagcaaaatcgaggaaagtgaaatctttcatccagtcataattgttcaccagttcggcacggttaggcacatccgactcgaagtcgaggaacttggcaagctgatttttaatacatgcctgattgtgacgcaatgtttcctcgttcagcaggttacgttctgctgattttccggaagggtctccaatcatacctgtagcgccaccgatcagtgccaacggcttatgaccgcagcgttggaaatgacgaaggatcatcactccacaaaggtgaccaatgtgtagcgaatcagcagtcgggtcgatacccaaataggcagtcacctgctctttgcttaacaactcttctgttcccggcataatgtcctgcaacatgccacgccatctcaattcttctacaaaattcatcgtattactctattaattagttgttttttattgtatttcaatcccatgtgcgacaaaagtacgactctttctcggaagatacaactcttatgccctaaaaaagacattttggatatttcggcggatcgtctcacgcaacacttccacttctaccccacgcactttggctgcccgacacaggatatcttcaatatcaagcgaactgttgtccgtttccagaaacaaccgttcgtcgggtactgtctgcatcgtttcatcaggataatgttctccaaaagagagataaaagtcctttttcaacaactgcatcgcctgctccgtttttccacggaaaccatgccatatccaagcttgttggggacgaaattcttttttcactgctaacagctcgtccattgctttcacgcagtggataatcaacggcaaaccatactcttccgacagcctcacctgcgctttaaacaccgttaactgaagttccattgaagctactgccaatttatccaatcccgcttctcctacggcgacaaactgctttttccgcaactgctgcttaagataatccaaaagctgtccggcattatgctctgtcaactcccagggatgaatgccgacagaataataatatcccctatccacttccacatctcctgcgaaaggcatatacaatggagagtccgccaacagcggataattcacgatagattttcccagagaatcggcctccagtttatgagtatgaatatccaaaatgtcagtcacattctttttcatcttctatttctcattttaattgcttcaaggtacgggatcatagccggaaccaccccagggatggcatcgcagaatacgccggacagcgaggtaaagcccctttacaggaccgtgtttcttaattgcttcgacagcataagccgaacaagttggcgtgaatcgacaagagggaggagtaagaggcgaaatacaaacccgataaaagtagatgggaacaagcaacaagaaagagaatactttcctcaaaattcccgttacgaatacccacagggcagatatccgggagttacgaggtttcatgaggatagtttttcagagatgcgcgcaagcgctattttcatcttttcttccaattcggaagttgcaataagctcgtccgacagatagataaaggcaacggctaaccgctgctcccggcgttgcaattcgtccaccaggagagatttgttcttccggtaggcttcgcgtatctgacgtttcacacggttgcgtttcaccgctcgtttaaaacgacgtttcgatacactgattaatatagaagcaggagcctcgccctgctcaacaggcatatatacaacgcgtatcggaaagatggaaaacgacttcgaaacgccgccttcaaacatctttccgatcaaaattttactattcagcctttcggctttacacaaagtatatatacccactctgtttatttattgttttctctgataaacatatcaagtgcggcagtcattgacggagcctgcaccgtaggagcttcaaggtccagacggagacctgcgtcacgtacagcctgtgcggtagtagagccgaaagtgccgatcttaatctctctctgattaaaatcagggaagttcttcttcaatgaagtcactccggcagggctgaagaacactaacatgtcataatcaaactcctcgtccggtgtaaagtcgttgctcactgtacggtacatcacagcttctgtatgctgaatgttattcttgtcgagcaagtttttcacatcgtcattgtgtacgtctgacatcggaacgagatatttctccgttttatgcttcacaatggaaggtatcaggtcctcaatctttccggtagctccgaagaagatcttacgcttgcggtattgcacatatttctgaatatacaatgcaacagcttccgtcacgcagaaatacttcatcgtttcgggaattgtcacgcgcaattctgtacacaaagtgaaaaaatggtcaatagcatggcgcgaagtaaatattacggcagtgtggtcgagaatcgaaattttctgttgccgaaattctttcgccgaaagactttcaaccttaataaatggtcggaaatctattttaacgccatacttttcagctatgtcgtaatagggagatttctctgacgcaggcttaggctgcgacactagtacttttttaattttcaacgtcctaaaattttattagcaaaatattgttcatttgaatcataccttgatagagtagcagacaaggtactatttcaagagcgcaaaagtacaaaattaataggaaaagcccgctaaattgatgaaaaaaaagctttatccacttataaaacatcaatattttagtgaaaattaaaataatagacccaattatgaccaaatttgtgagacttaaatcaaaataaactagaaaaagaacgaacggaaagagggcaaatccgacataatatatgagcgcagaataggattccagccatatatttgtcttatttttatcaaaaaacgtccacccaagaaacatgtaaatcagccattttagtaagaaataagcaaggcagaatccaacgtagatacccagcaaaaggaggggggatacctggttcatcaaggtaggagatgtatcatgaaaataattgagaaatgtgatacccgacaagacacaagtctgcaacacaagcacaaggagataacgcacatcggctgccgtagaactatcaaaaatactcgttcgttcacggtgcaatacaaagtctttcacctgttgggagagaaatctctttccgcgcgccaaggctatggaggaaagaaagaagcaagccagcaaggtcaacgcaatggcatcgtccgtgcgaggagagtaggagataggtgtcccctcaaagccggaatcaacttcttgcacagcatgaagatcagccaactgcagactatcagtgtccgcctttgccggactaatctggtccttccggagaagagacagcgtatccgcacttcgggaacttagtgtgtcgcctatcatatcgctgcaaatttacgaatggaaatgtcccatacaggagtttcataaagcaattgaaccgcttcttccggcgtctgcgccactttccatatatcgccatgctgccggcgcataaagttctcatcaatagccttttcaagcatttcgaggagtggatcgaagaatccgtttatattgaggattacaatcggattgagatataatcccaattgtttccaggtaataatctccagcagttcttcaagggtaccgcatccaccgggcaaagcaataataccatcgctcaaatctgccatcttccgcttgcgttcgtgcatggattctacttcaatcagttctgtcaatcccgtatgatgccagttttgctctaccataaaacgaggaatcacacctgtcacctcaccaccatttttcaatacagcatctgccacagaacgcatcaggccaatacttccggcaccgtttatcaaacggatacggtgttcggcaagcaaacggccgagagtatcggctgcctggaaataaacagcgtctatcttggtactggaagcgctatatacacatacggaatttatctgattcatcttcatcactatccattattatatcgagaaggcaaaattacgaaaaaattccgttattcacattcaacttaatcagagatcatttttatctctacatttatctatccctataaaaaaatcttggactccttatccagaagtccaagaacctttctcacagagaatacatctatcacagatttctcatctactaacaggtgtatcaaattgttgctgaatgaactttattattcgaatcataaaa

SEQ ID NO: 8310 - DNA, 6518 bp, Unknown
  gut microbiota DNA sequence
gttttttaatcgtcaaatagcaaattaataaaatgaaagcaatcttttgtatcacagggcttgccatacaaggtttgacaatatcagcccaggcacaaaccggcaaaccgaatattgtggttattatgaccgatcagcagcgtgccgatttgtgcggcagggaaggttttccgctggaagtaaccccctttgtcgaccggttggcacaggagaatgtatggttcaataaggcatacactgtgatgccggccagctctccggcacgttgttccatgttcaccgggcgttttccttccgccactcacgtacgcacgaatcataatattcctgacatttcctatcaacaggacttagtgggcgtattgaaagaaaacggatataaaacagcattggtcggcaagaatcacgcttacctgaaacctgccgacctcgatttctggtctgaatacggacactggggaaagcacaaaaagacgactcccgcagagaaagagactgcccgtttcctgaatcagcaagccagggggcaatggctggagccatctcccatctcgctggaagaacagcatcccaccaaaatcgtgaacgaagcgctggcatggattaaacagcagaaagaaaatcctttcttcgtatgggtctcttttccggaacctcacaacccttatcaggtatgtgaaccctattactccatgttctcccccgataagctccctgtcttaaagacctcccgcaaagatttggcaaagaaaggagagaaataccgtattttggcgcaactggaagacgcgtcctgcccgaacctggaacaagacttgcctcgaatccgtgccaactatatcggaatgatccggttgatagacgatcagatcaagagactgatcgaatcattgaaagccagcggacaatatgaaaacaccctctttgtcgtactttccgaccacggtgactactggggggaatacggattgatccgtaaaggagccggactttccgaaagcctcgcacgtatcccgatggtatgggcaggatatcacattaaaaaccagcctgcccctatggatagccacgtatcgatagccgaccttttccccaccttctgctctgccatcggtgccgaaataccggcaggagttcagggtcgtagcttgtggccgatgctgaccggaaaagcttaccctaaagaagaattctccagcatggtcgtacaacaaggcttcggaggagccgatgtcggactggatgcctccctgacttttgaacaggaaggagcattgactcccggcaaaatagcccacttcgacgaactgaacacctggacgcaaagcggtacctcacgcatgataagaaaggatgactggaaactggtcatgaatcattatggcaacggagaactctataatttaaagaaagatccttcggaagttcataatctgtttggcgagaagaaatacagcgaaattcaaacagaacttctgacccgtttactggcatgggagttgcgtttgcaggacccgctgcctctcccgcaaagacgttaccattttaaacagaatccatttaattatctccatccggaatactaaaaaataagaagattgtacatacctacggatattaaaaacatgattccatgaagtctgccccgcaacggcctatttttgtatccgtaaacataaaacagaaatttatgaaattgattttgcgattaggattgatcttgtttacaggatttatttccatctctacagcatcagcacagttatatggaacggcagatacaaacgctccggaactacgtgttccgacatctgtaaagccggcatttgattattggatgagggacacttgggctacgctaggtcccgacggttattattatatcacaggaacgacctctacccccgaccgttactttccgggacagaggcattgctgggactggaacgacggtctgtacctgtggcgttccaaagatatgaagtcctgggaagccagaggacaaatatggtcgatggaaaaagacggaacctggcaaaagaagccgaaagtatataaagcaggagagaaatatcagaagaaatccatcaacggtgatccgatggacaaccgcttccatgcagtgtgggctccggaaatgcattatatcaaaagcgcgaagaactggtttatcgttgcctgcatgaatgagtcggcaggtgggagaggttctttcattttgcggagcaagaccggaaagccggaaggaccgtacgagaatatcgaaggtaataaagacaaagctatcttcccgaacatcgacggaagtttgttcgaagatacggacggcactgtctactttgtcgggcacaaccattatatcgcccgtatgaaaccggatatgagcggatttgccgaggaactgaaaacattgaaagagaaaaaatataatccggaaccgtatattgaaggagcgtttatcttcaaatatgataacaaatatcacctcgtacaggctatatggtcgcaccgtacgtcggagggagatacctatatcgagaaaaagggagtaacctcgccgaagacacgttatagttacgactgcatcatctcgacagccgataatgtgtatggtccctatagcgaacgctacaatgccatcacgggaggaggacacaacaatcttttccaggataaggatggaaactggtgggctaccatgttcttcaatccgcgtggggcacaggcggcagagtataaagtgacgtgccgtcccggattaattccgatgatctatgagaatggtaaattcaaacccaactttaattataataccaaatgaaaacttctttattgatagcaggcagcctggctctggtcccgatgacgtatgcgcaggacaagccgaatattattatcatactggcagacgatttgggcttctccgatctcggctgtttcggtggtgagattcatacaccggtactggataaactggcaaagaatggcgtccgtatgacgcagatgtacaacagtgcccgtagttgcccgtcgcgtgccaacctgttgacgggactttatccgcatcagacgggattgggacacatggacggcagtcatcctgcctggccgaaaggatattccggtttccgttccaattcggacaacgtcacgattgcagaagtcctgaaagatgccggatattttacggctatgtcaggaaagtggcatttggggaataagtcgaatcctattcttcgtggtttccaggagtattacggtttgttgggcggattcaactctttctggaatccggcagtatatacccgtttgccgaaagaccgtacgcccagacactatgaggaaggaactttctacgctaccaatgtgataacggattatgcgattgactttatcgaccaggcacatcaggagaagaaaccgttgttcctgtatctggcctataacgctccccatttccctttgcacgcaccgaaagaagtgaccgataaatatatgtctctctatatgcagggatgggacaagattcgtgacgcccgctggaaacggattgttgacctgaaactcatgcaaggcaaaccggcacttagtccacgtggtgtagttcccgaaagtctgtttgaagatgaaacgcatccgctaccggcatgggactcattgacgaaagatcagcagaccgacctcgcacgccgtatgtccatttttgccgctatggtagatgtgatggacgcgaacatcggccgggtggtagatgaattaaagaagaacggtgagttggacaatacgtttatcatgtttatgtccgataacggagcttgtgccgaatggcacgaattcggtttcgacaaacagaccggagtcgaataccatacccataccggagaagaactcgaccaaatgggtttgcccggaacctatcatcattacggtacaggctgggcaaatgtctgctgcacgccgttcacgctctataaacattatgcacacgaaggaggtatttccactccgtgtatcatttcctggggtaatcatgtgaagaacaaaggcggactgaatcatcagcctgcacaattctccgatatcatgtctacctgtgtggaactggcaggagccacttatccgaaagaatatcagggaagagcgattctgcctacggcaggtcagtctatccttccgattgtgaaaggaaagaagatgcccgaaagatatatttatgccgagcatgaaggcaaccgcatggtgcgtaaaggtgactggaagctggtttccgccaacttcaagggagatgaatgggaattgtacaacatcaaggaagaccgtaccgaacagcacaacctgatcggtaaatatcctgaaatggcaaaagaattggaaacagcctatttcgaatgggcggacaagagtgatgttttgtatttccagaaaatgtggaatacctacaataagaatcgacggaaagattttaaagaatataaaacccgctaatgcttatggataagagaatcttactaactctggctttaggagccatgtcgcaggtgtttacccatgcatgggagcctaaaggagataaaattaaaacagtatgggctgaacaggtgacgccggaaaatgtgtggcaaagttatcccagaccacagttgcaacgggcagaatggatcaatctgaacggattgtggaagtatgccgtaacggatcagaacacgcctcggaagaatgtttcctttgaaggggaaatcctggtcccgtttgcgattgaatcatctctgtccggagtgcagaaaacatttcttcctacggataaactatggtatcaacgtgagttcaccttagatccttcctggaagaacaaatctactatcctgcatttcggagcagtggattatgaatgtcaagtatgggtgaataaccggttggtcggtacgcataaaggaggaaacaacccgttctcgttcgatattactaaatatctgaagaagagtggtcctcaaagcattgaagtagccgtcaccgacccgacggacacggaatctatttcccgagggaaacaacaacttaatcaggaaggtatctggtacacgcctgtatcgggcatttggcaaactgtgtggctggaagcggtgaataaaacctatatccgtcaggtacttccttccactgatattgaaagaaaatccgtgaagctggctttcgatataatcggagccaaaggcaatgaagaagtgaaaatagaagtgttggatgatggcaaagtaatcaagacggtggaacagaagttgactaatgcgatggagatagacgttccgaacgctgtcttatggtctcccgaatctccgaaactgtatcatttgaatattgtcttatccaatggaggacgtgttttagaccgggtaaagagttactttgccttgagaaaagtagatgcccgtaaagatgaatgtggatacaaccgtatttgcctgaataaccaacccatcttccaatacggtccgctggatcaaggctggtggcccgacggattgttgactcctccttccgaggaagcgatgctgtgggacatggtgcagttgaagaagatgggattcaatatgatccgtaaacatatcaaagtagaaccggagcaatattattattacgccgattctctgggattgatgatgtggcaagacatggtttccggttttgctacgtcaaggaagaaggaggaacacgtcaatccgttggctactactgattggaacgctcccgaagaacacacccgccaatggcaaaaagaaatgttcgagatgatcgaccgtctccgtttctatccctgtatcactacctgggtggttttcaatgaaggatggggacagcataacacggtggaaatcgtaaataaagtgataaaatacgacgatacacgcctgataaacggagtgaccggctggacggacagaggcgtaggcgatatgtacgacgtacataattatcctgtcacttccatgattctgccggagaacaacggcaaccgcatttccgtactgggagaattcggcggctatggctgggcaatcaaagagcatatctggaatccgaatatgaggaactgggggtataagaatatagacggagcaatggctctgattgatagttatggccgtctggtatatgatttggaaacgctgattgcccaaggattgagtgcggcagtctatacacaaaccactgatgtggaaggagaagtgaacggcctgattacttacgaccggaaagtaactaaaataccggaaggcttgttacacctgatgcacaaccgtttgtatgaaatcacccctgcgaaagctgttactttgattgcagacagtcagaacggaagcaagaatacccgccttgtcagtctgaacggtcaggagttgaaaatgacttctttgcctttcgactgtccccctcgttctacggtagtatcagaagctacttttaaggtggataaggatttcaatcatctgtctttatggctgaatgttgccggagaagcc

SEQ ID NO: 8311 - DNA, 1640 bp, Unknown
  gut microbiota DNA sequence
tgctacctacgctgacaagtaaaatagagaacaccaataaatagcgtttagaacaacaacatcttgttttcatttagcagtctgttttattttacgatacaaaagtagcaatttccgataaaacatacttagtagccaaaaaacatttatttaaatataacttattaaaaatcaagagctacaacttcaatttccattaaaggaagttgaaattgcagctctttcttaacaagttaagccctgtttcagactgttttacagaccaaaagcagctttaattttatctacgtagtcgagtttctcccatgtaaagagttccacttccacagttttgtctccttcgtaacgagagaagaatttcttcgttatcacttgcggttcacgtcccatgtgaccgtaagcagctgtttcctgataaataggattacgaagtttcagatgttcctcgatagctttcggacgaagatcgaacaattggtcgataacacgcgcaatctcgccatcagtcatgttgacgtgagaacggccgtaagtatcgacaaagatattgattggacgagccacaccgatagcatagctcacctgtacaagcatttcgtctgctacacctgccgcaaccatattctttgcgatgtgacgtgctgcataagctgcactacggtctaccttactaggatcttttccggagaaagcaccaccaccgtgagcacctttaccgccataagtatcaacgataatcttacgaccggtcaaaccggtatctccgtgaggaccaccgattacaaattttccggtaggattcacatgatagatgattttatcattgaacagtgccaacaccttatcgtgatgaatagaagcaattacacgaggcatcagaatctcgatcacatcacggcggatgatagacaacatttcttcgtcagctttcagttgagcagcttgagagtcatcttccggttggataaagtcatcatgttgtgtagaaacaacgattgtatcgatacggacaggcgttccgttgtcatcatattcgatagtaacctggcttttggcatcggggcggaggtaagtcattacctttccttcacgacggatgtcggccagcacttgcagaatgcggtgtgccaaatcaagagaaagcggcatgtagttttccgtttcattggtagcataaccaaacatcattccctggtcgcctgcaccctgttccatcggatcctgacgctctacaccacggttgatatcggggctttgctcatgaatagcggaaagtacaccacaagagttgctttcgaacatgtactctcctttggtataaccgattttcttaatcacttcgcgtgcaatgagttgtaggtcaacgtacgcttttgttttcacttcacccgctagcaccacttgtccggtagtcactagtgtttcgcaagctactttcgaactggggtcgtaagccaacagtttgtcaagcacggcatccgatatttgatcggctaccttgtcggggtgtccttctgacaccgattcggatgtaaataagtatcccatctttcttaaattaagaattaaaaaataagaatcaagaatgagagagtaggagaggcgagtgctgcaaaggataagccgaaaggcgtcaatca

SEQ ID NO: 8312 - DNA, 2956 bp, Unknown
  gut microbiota DNA sequence
ggaaatgaaagctacttttttctttttagaaatagcctttttaatttgtttcacagctttatcaacgggagtaacccagaacaatccttctccttttgccatagcggtgtctacaaatccgggacgaatatcggtagtgtaaatagaataaggagatttagttgctttttgtcgtaatccttccatatagttgatttgataggctttcgacgcattgtaggcgggagcgatgccactgccgcgtgtacctccaacagaggaaatagtaaccagatgcccgcttttttgctgttcgaaatatcggaaaccccagtctgcgatgttggtgaatcctatcacgttcgttagtaaggtaggttcttccaattggtaggagagttcggggtttagttctccggtcccggcacagataatcaatatatccattccacccatcttttgagtgagagtttcaagggatgaaatggtagcttgtgtatcggtgatgtcgcacacttgatagaatagtttgtctttgtcctgggcgcatacctcttctaatagattttccctgcgaccggtaatgccgataagataatcttcttgagaatagacttctgccaatccacgaccgatgccggaagttgcacctataattataatttttttcatgaaatacaatatactttgtttgcccgcaaaagtaagggtagagaataaataaactcttgattgaaatcaagaatttatttttgtacgacttttcttcggatacgacttaatgtttcgggacgaatcagaagataggaagccagttcttttaaagttatcagtttcagtaagtcgggacaacggttgataatttcaagatagcgttcttccggtgtcaggctgtacattgaaatcatccggtcgtagacttcccacaataacgtttctgcgatgcggcgtcctaacttttggtgagcgtcgttggtatcgtagaagtctgccatttgctggtaattgattacgtataccgaacagtcacacaaggcttgtatatctacatttgattggtcctgtaactgaaaagccggatagttgccaacaaaagaatgatcgaaagtatagcctacaatgctgttttcgcctacactgttggtgcaacagtaccggaaagaaccggaactgacgaaccccattgttttgcatacttctccctggcgggaaaagtagtctcctttcttataataggtctgcttcccctgttgtaatacaaaatctacaataggggagtagttgatgtgggaagtatatttgttgaaatcttccacagcgtatgaaaattagccttcgtttataacctgaaatccggcctgtttcaaatcttcccaatatccgggatatgatttggtaacgacttgcggattggcaataagtaaattgggatggcggataattgccggtgcaaatgccattgccatccgatggtcttcgtaggtttcaatcaccggagtttcttccggttcacatcgttcgccattccacattaatatactgtcattttcttcctcgatcacatatcccagctttttaagctcggttcgcagggcggcaatacggtcagtctcttttattttcaggctttgtaatccggtgaaacggaaagggatattcagcaaggcacaggtaacaacgaatgtctgtgccaaatccggaatgtcgacaaagtcttcttccagtctttccggcgctttgcctgtttttttcagtttcacaccttgcgatgtaaattcggtagttatacctaagcgtgagaaaacttctgctccccggctatctccctgataactgttaggaaacaaccccaataattcaatttctgctttgggagataaggcagcaatctgataccaataggaagctgcgctccagtcactttccactttgaaaggaatgctctgatagagttgtggagcaacggaaatgctattaggagaagtccatgcggctttggctccaaagtcctgcatcagttgcaatgtaagattgatataaggacgggaaattatctccccgcttaaatgcaaagtcaaaccgtctttgagtgccggacctatcatcaatagagcagatatatattgggaactgacatttcctttcagtgttatttcgtttcctttcaattctgcacctttgatgcggaggggaggatatccttcattgcgggtatactctatttcagctcctaattcccgaagcgcattgactaatatctgtatcgggcgttgctgcatacgggctgttcctgtgattgtccgttcccccggggtcacacttaaataggcggtaaggaaacgcatagcagtgcccgcagccatgatgtcaatcgtctctttcccttcggtgagagcttttatcatcacctgtgtatcgtcacaatcggacaggttttcaggaggataaatacctttgcccagcgcattgatgattaatgcacgattactgatacttttagaagccggcaactggatagttgctgttactactgaaggagggatgagtttatagagcatcatttctattttctttggtttgagatgacaaaaatagacataaattggtatatatgcagttataaagtcagaaaaacaatagaaaatttagaatgggaaaattacaatcgtatttgaagtagaggataaaatctcaagaaattacaattgtatttaaaataaatgctatatttgtgatgtattgcaatcgtatttaaaaagaagtagaatgaaaatacctcgcataattaaacaaagaaacacttatgttgaccgcataagacctttcatgaggaaaacattggtaaaagtgatggtcggtcatcgtcgtgtcggtaaaagctttattttgtatcaactcatggagttgatacggaaagaagagagtgatgcgaatattatctatataaataaggaagatgtcaatttcatagatataa

SEQ ID NO: 8313 - DNA, 2045 bp, Unknown
  gut microbiota DNA sequence
tcatgtagattaaataaattatttatgaaagaaccgaaaataagtatagcgtcataacagattaccttttacgattctccgtttgacaggtttagactaaacgaatagtacttattttgcttttttctttttcttcgcgttatccttcttacgcatatcctggtatttcttatattgttcatcggtcagaatgctttttattttagcatctatttcctgccttttcttttgcatttcttcccgcgtaggtctttcattcgatttatttttcgcaggtctcatttcttccattgcagctttgaaatctttggcctgtttttcattcaagcccagatcggcaacaatctgttccatacgtttctctctatcagcctttccattctgacgattttgagccatacatacagttgagccaatcaataacgcaactgccaaacttaaaatttgctttctcatcattttaattctcatattaaataagttatgtatgttagacctcacaaatgggtgaaagttaattcgataatgaggctaaaaactgttttttcacattatttatcaaagggcagctagtatcacatcgaaaaacgaataaacgttttcttatccggtaaaaaatagcaatatccagtttatcggtttagaaatattatttctatatttgcaggaaacagatcaaaagcttgacatacccttatgcaaacctattacaaaactgattaataattaaaacgatgagaacacttttctttattctgccatttatctttatcactacgggatgtattaaacagaatacagaaaaaagtgatattttgacaaaagaggatatagccaaatttgacagtttatttaatgcttgggaaaaagaaatacacagcaatcccaaagcacaattaagttcaagtacccgtgcctacaccattttaccccaattcaaagagctaaaagctatgggtaagaaaattatcccatgtatcatagaacagtttgaaaaggacaataacactttttttgctttacctctttatgacgaattacaagataatgacagcctaaaatctcacagagaaacaagcgaacaagataaagtgagcgagattgtacagaaattcagagaacaggaaaaaagaaagatgtgggaagaagctaatagatacaagacgtctataaccgacactactttcctgaagacaagagggacgatgtcgtatgctgcaatagatttattcacgggacgaggtttcaataaagattacgcatttaatcaggttgtctatttgaaagccttacaaagagcccagaaacatctgtctgtcgtaaatggtcagttggcatgcgacttaaagtcaggtacagaaatatatatttccgaagatttatacctatttatcaccgacctttttaaggattggaatacgtggctggaatcgggaaaatatgagataataaaagacgaacaagggctttatacagtgttacctaagaaaaccaaccaatcatcgcaaacgaactccgtcacattgcgacctattccccgtgacattccggctggagagaacataagtcccgcttcgctttctatagaaacagaacacgatcattatccgctatcaactacagaagtaaaaataaccatcaccaaccactctcactatgaatatgagtgcggagaaaaatacagccttgcttactataacaaaagtaaacggcaatgggaaacattgccgaccgatcctgtcgttaatgatatactgtggattttcccaccggagcacccgagtcaccaacaaacaattaaactctatacatcagaatcccccaaccatccagggaaataccgtatctacaaatcattcaacagaggcaccaaagtggcttatggagaatttgaattactaccttaatgtgaatttccaacaacaagcacactccggatcagtaacattcggataacagctaatcatttcagtaacaaatctttcgtcaatgacgcgtgcaaatccatcatgctcgaattttcggtatgaccaacgagttacgag

SEQ ID NO: 8314 - DNA, 3883 bp, Unknown
  gut microbiota DNA sequence
ctccgcttcagtacccagacccggggtcgaaccgggatggaagtgaatccactggtgtttgagaccagcgcgtctaccgattccgccatctgggcgcatacttgatttctcaattgcggtgcaaagatacgacattattttgattccacaatagtttggcaaaaaaaaggagaaaaaaataataaaacatatcttaaacacttctctattcagagaataaaccgtacattagcagaaactttaaaatagagtcactatcatgacaaaccaggataattattgcgtgattatgggtggcggcattggaagccgcttctggccgtttagccgcaaaacattgcccaaacaattcttagatttcttcggaacgggccgttcacttttacaacagactttcgaccgattccaaaaggttatcccaacagaaaatattttcatcgttaccaatgcaatgtatgcggacttagtgaaggaacaattgcccgaagtgaacgaagaacagattctgctggaacccgcaagacgaaataccgctccgtgtatagcatgggccgcttaccacatccgggcactgaacccgaacgccaatatcgtagtcgctccttcagaccatttaattttaaaagaggatgagtttcttgccgctatcgaaaaaggacttgattttgtttcacgctcggaaaagctactgacattaggtattaaacccaatcgcccggaaacagggtatggatatatacaaatagacgaacccgcaggagaaaacttctataaagtaaaaacattcactgaaaaaccggaactggaattagctaaagtatttgtagagagcggagaattttattggaattccggcctatttatgtggaatgtaaatacaatcatcaaagcaagtgaagatttactgcctgaattagcttccaaactggcaccgggaaaagatatttatgccaccgacaaggagaaagcattcatcgaagaaaacttcccagcatgtcctaatgtatccatcgacttcggcattatggagaaagcggataatgtgtatgtatcattaggagattttggctggtccgatcttggaacttggggatcactttatgatttatcggaaagagacccggaaggcaatgttacgctgaagtgccattcacttatatataacagtaaagataatatggtagtacttccgaaaggcaaactggccgttatcgatggactggaaggatttctgatagccgaatcggacaacgttcttttgatttgccgcaaagatgaagaacatgccatccgtaaatatgtaaacgacgcccaaatgcaactgggcgatgatttcatttaataatacgcaacctgacgccggaatcaaagccggataagatcatacaaatagtgaacggtgaacaaactgcataattgattgcagagagttcaccgttcactgtttataatcaaaaaactttgtgtgtctttaaataatcatgagtttctaaataatctctattccctgctccttgcaaagttgcagtcccagatctttcaatctgaacttctgaatctttccactacccgtcatcgggaattcattcacaaagaagatatatttcggaatcttataacgagatattttatttctgcagaaatcacgtacatcggcttcctgcatttgtactccttcctgcaaaataataaatgctccgactgcctcaccatactttttagaaggaataccagccacctgaacatctttcactccatcaagcttataaagaaactcttctatttcgcgcggataaatattctcgccaccacgaataatcatatctttgatacgtccggtaatccggtaatttccatcttcatccttaatacccaagtcgccggaatgcaagaagttgttttcatcaagcacttccgccgttgcttccggattcttataatatcctttcatggtattataaccacggttacacatttcaccttgaacaccaaccggacattcttcacctgtttcaggatcaatcactttcacctccgtaaattcaaaatcatgtcctaccgtattacaacgtacatcgaacggatcatcaatacgggtggccgtcataccgggagcggcttctgtcaatccgtagacgctggtcaccttcatatacatcttctcttccacctgcttcatcagttcgacaggacacagagaacctgccataatacctgtacgaagacaagacatatcaaagagatcgaacatcggatgatgcaattcagcaataaacatagtcggcactccgtaaagagccgtacaacgttctttatgaatagaggccagcacaaccaacgggtcgaaacgttctaccatcacttgtgtacaaccatgagtcagacagttcatggtagccaatactaccccaaaacaatggaacaacggaacgcaacaacaaagtttgtcatctgccgtgaacttcatgtgttcaccagtcagaaatccattattggtgatattataatgtgtcaacatcacccctttcgggaagccggtagtgcccgatgtatattgcatatttactacatcgtgacaatccactttgctttttagttcgttcaaacggccatcttccacattatctcccaacagcaggatctccgctgtattatacataccacgatgtttttcctgacctacatatactacatttcgcatatatggaaagcgttcgctctttaaatgtccacgctcacaagtcttcaattcaggaagcatcgtgtatgtcatctgcacaaaatcactatccttctcaccattcacaatacaaagcgtatgcatatccgagttctggcaaagatactccaactccgattgcttgtagttcgtattcactgtaacatataccgcaccaatcttcgcgcaggcatatagcaatgtcaaccaatcgggaacattagccgcccagatacccacatgagtaccacgttccacaccaatggcaataagcccttttgccatatcatccacacgacggttcaactgactccaggtaaaacggagatttcggtcggaatatacgatatattccttatcgggagtctcttcagcccagtgttccagccactgccccaaagtacgatcaaataattgcatgtaattatacttaagtcttggttcctactatttcattaaatcggtgtgtaaactactgccaggatttttgcagcctgtccctcataagcatgtacatgatgaggaacaatggaatcataataaatgctatcaccctcttccagcagataggtgttcttgccatagctgatttccatgataccttccataaccatgataaactcttctccttcatgagaagaaagcacgaagtcagtatcttccgtcggcatcacatcgataataaacggttccatgtgacggtccgcctttgacttggacaacgagtgatattccatgtgtttgcgagagtgaatcgcattattggaaaaactgatcgcatccttggcctctttcttacggcatacgaccggtccgacttcatcctgatcatcaaggaaagtacccagacgtactcccaacacacgcgcaatcttaatcagcggtgcgagagaaggtatatcaatgttattctcaatacgttcaacctgttcgatagccaaacctgaacgttgcgccaactcttctatgcttattgatttatcttcgcggagggctttaattttttcgccaacaatcttacttgtatccattttgaaagcattttagttatcaaaggtgataaattataataattaagctgcaaaaatagcaaaatctttagatgaacacaattataaccgaagaaaatacgactatcaggaagaaaaagaagaaactaaaaaa

SEQ ID NO: 8315 - DNA, 2550 bp, Unknown
  gut microbiota DNA sequence
gaagcggaactattccacgcccacgcttatcggctggctgtgaaatgttatcagccccaaatcccgttcgatatacttcccaaagaaccgactctggaacaatattcgcgcttatcctacgacccggacatcatatatcgtccggattcagtccagttttatctctcccaaccgtcatcaatgcccgaagaaaccactttccgggaatcggttcaagcagaaaaatctccattgacccgtgccgtaccgggatatgatgcggaaaatgccttcttgatgcttttcgaagccgcttttcggaaagcgtatgccgatctccgggaagcgggactcgaattgcgcgaagacacatggcatcctttagttgtccaactggccaaaaactgttttgcttcgggacttccgcaagaagaagtcgtgaaacgtactgttttccacttctatctgtataaacaggaagaacttatccggcaaatgattggcaatatatataccgagtgcaaaggcttcggcaagaatatcagcctaagcaaagagcagcaactcgccttgcagactgaagaattcatgaaacgccgctatgaattccgccataacacccaaattggtgaggtagaatatcgtgaaaggctttcttttcgtttccgtttcaatcctctcgataaacgtgcgctgaacagcattgctttggatgcgcaaatggaaggtatcccgttgtgggacagggacattagtcgttatatttactccaaccgcgtgcctgtattcaatccgttggaagattttctctaccggcttcctacttgggacggtaaagaccgtattcgtgcattggcagccaccgttccttgtaagaatccgtattggatggatttgttccaccgttggttcctcaatatggtttctcattggaaaggaagcgataaaaagtatgcgaacagtgtttcgcccttacttgtcggaccgcaagggacacgtaaatctaccttttgccggagcataatgcccccttccgagcgttcctactataccgacagcattgatttttcccggaagaaagatgccgaactttacctcaatcgttttgcgcttatcaatatcgatgaatttgaccaggtaagttcgacacaacaaggtttcctgaaacatattctgcaaaagcctgtactgaatgtgaagaaacctcatggcagtgccgtgcttgaaatgcgtcgttacgcctcattcatagccacaagcaaccaaaaagacttgttgaccgacccttccggcagccgtcgttttatttgcatcgaagtgaccggagtgattgacaccaaccgtccgatagactatgagcagctttacgcacaagctatgtacgaattggaacatggcgaacgttactggttcgaccaggaggaagaaaagatcatggtggaaaacaaccgtgaatttgaacaagtcccgccggaagagcaacttttcttccgttattttcgtgccgcacagcctgaagaaggggagtggttgtctccagcggagattatggaagatattcaaaaaggcagttcaatcccgatgtctgtcaagagggttaattctttcggaagaatactgaaaaagcaagaaataccttccaaacatacgcgtagcggtacactctatcatgttgtaagactaataaccaggtgacggcaaaaatgccgtcaccctgccgtcacctcttgctgtcacagtcttatcggttcattactaaactattaactcctaaactgtgacagatgacagcaacttaccaaatatattcttctgtgtaacgttggtaagttggttcttcttttattcctttattacggaatagttgtctgatgtaggcttggtctttgggcataagcccccgttctccacgatagaaccgataatatcccgtttttccatagtgtccgaccatttgtattctgatactgatcgcatcttcatagggaattctgttaagcaactgtttaagtccccatgccacatggacttttacagtagttttaaaacattcgcattggtttccatccgcaggataacgtgccggattaatgatagtgatatataggttgtcggctgtatcaagttgtgtagctatgtggcgcaggcatttgggggcttgtggacattgagcgttgaagcaacgggcaaaattgtaagggacagacagactgtcgggttcttctttcatcttgttgggcttattttatttgtgaaatactgttgtaaatatagcaaacagaattcttcacaaaagtaggactttattttgggaatgggaagcgttgggattgttttatttgtatgttatggggatttcttatcaacaattggtaattagggatactcaatacatatccctgattatttgcagcaaggtttctctttcttgtttaaggtcttttatctctatttttagccaatcaatttctttgtttttgaggaaatcaattcatctacaacttccttagggaaataatgttataaacgaagttgagtgttttataaaggtcatctattgtaattaggggg

SEQ ID NO: 8316 - DNA, 1994 bp, Unknown
  gut microbiota DNA sequence
gatatgtgccgctccacacacaacaaaccttgatttatttattggaaaactattttatggtgctataggccgtaagacaagtttcatgatgaaaaaagaatggtttttctttccgcttggcgtttttttcagagcagttggcggaattcccgttgatcgcggtcgaaaaacgtcgctagtagatcagatggttcataattttgctgaatataaaaagtttaatttggctatcactcccgagggaacccgcaaagcgaatccaaactggaaaaaaggcttttattttatagccttgaaagcccaggttcctatcgtgctgattggtattgattacagcaagaaaacaatctctgcaacgaaagccatcatgccgtcaggagatattaataaggacatgaaagaaatcaaactttacttcaaggatttcaaaggaaaacatccggagaatttcgctcttggagaaatatgatttaagtatcaggtattaagtataatacttagttatcatggagtctatccgtatttctatcatacaaaccgatattgtttgggaaaataaacaagaaaatctccgtttgctccacgaaaagctgcaaagtcttcgtggaataacggagattgttgttttaccggagatgttttctaccggattcagtatgcagagtaaaatactggcagagccaaattccggggaaaccattacaacactcaaacaatgggccgccaaattccagctagccatttgcggaagctatatagcaacagagaacgaacagttttataaccgtgcgttctttctgacgccggaaggagaagagttctattatgacaaacgacatctgtttcgtatgggacgggaagctgaacacttttcggccggtgataaacgactcatcatcccctatcatggatggaatatctgcctgctggtttgctatgaccttcgtttccctgtatggagccgaaacgtaggcaacgagtacgaccttttaatatatgtagccaactggcctatcccccgccgtctggtttgggatactctactccgggcacgcgctttagaaaatcaatgctatgtatgcggtgtcaacagagtaggtacagacgggtaccaactttcatataatggaggaagtaaagtctactccgctttcggagaagaaatcggctcaattccagatgaaaaggaaggaataacgactgtcagtgtaaatctcactgctctcaaccaattcagagagaagttcccggtatggaaagatgcagacgaattccatctataacatttgccaaataacaaatgttaaaaacagattcatgtagcaacaatacctagaattcggtagttaattatatagacttcttttgtatctttgtcgtgaaaatacagtcgtaaggacgctaatcttacataacttaattaacaactttatgaaaacaaatcttagttctcaaatcagtctccaccgggtctcccccagatactacagaccggagaatgcatttgaaaaatcagtcttgacaagactcgaaaaaatccctacggacatctacgaatccgtagaagaaggtgctaactatattgctcgcgaaatagcacagaccatccgcgaaaaacaaaaagcaggacgcttctgcgtattggcactccccggaggtgattcgcccagccacgtatataccgaactcatccgcatgcataaggaagaaggtcttagcttccgcaatgtgatcgtatttaatatgtatgaatattatccgttggctcccgatgcaatcaacagcaacttcaacgctttgaagagtatgttattggatcacatcgatattgacaaacagaatatattcactcccgacggaagcattcccaaagataccatcttcgaatattgccgtctgtacgaacaacgcattgaaagcttcggaggtattgatattgccttgttgggcattggccgtgtaggtaacatcgcgttcaacgaaccgggttcccg

SEQ ID NO: 8317 - DNA, 1997 bp, Unknown
  gut microbiota DNA sequence
cgaatctaccaaaagtttggtctaaaaagatagcacccagacccagtactaggacatcatttaccgatgctactgattttcttggaaattcttatgccatagaaaacggaacatcaattatcggggacttttcaaatgcgagatttccaattgttaatatggaaaagctacttgaaagatatccttcatatataattgccaaagagttaaggacaacgtcaacagaagccatgtcatacgccagcttcgaacgcttagaaacaacttcatcgtttactaaaactgtcaaatccggattctcactaaatattggtccgttcaaactgggaagaaagaaaactgtaaccgatattttcaagcataacacaagtaattccgaacaagcagtacacggagaacttagtgttgaagttattaatggaatgatatccttacaaacagcacctagtgcattgagaagaatttcggcagattatttggacgaattatttgtagatgccctttataattcatccatggtagaattaattcaaagttacggagaatttgtcttaacaagctattatacaggtgggcgggcatcggctttatactatggtcttgacacacaaagtacagatttcaatagtaaagagcgcgacatggataaatcaataaacgcaacttattcatggaacaaggactctgtttcaggagatttttctgttggaacaaaagatggcaattcttctacagagactaaatctttttccgaattacatgtatctatcaaaacattgggcggcgcttatggttataatgttgcaacacctccttatgacgttaaaagtacatccattaatttaacgagttggcttcaatcattaaatgattcaagaacacatacaatgattgacattcaagatggtgggctctatccaatatcggattttattttggaagaaaactttaagcaaagatataacgacacccacatggattttcagcaccaagaacaacttgaagaaccgtatatagaaataatgaaagtatacgtccgcaaaagtagctcgggagagaaattatatgatattgtacctgtgctaaatacaagacaaggagataagctcatattctcaaactcaagtgctacaagtcaatccgatgtagaattaaaagcgaacagtgttgccgcaacctttaccgaaaaaagtaatgctataaaaaatgaaaagagcaaatattataaactagctatcaaagctaatccgaataaagtaataaatcctatcctacaaaccacattatcattttcaataaacgatgtagatgaggctggaatgtataagtttaaaaacacaaataccaatatttggtatatctacaacccgacatcgttatattgttttgcatactacgacgatgattatattcttgatgcatacggaatcttagattgggtaaacagtatacctgtaaaatcagtttcaatgacgactttatatcaacgatatagaatattcggtttgtaatgaagagtattaatagatattcaccaataaaaaagccagcccttttaaggggaggtaaaatacgtatcatttattaattcaaattatccgcttatgaaaaaattattgttacctttgaccattctgctgtttttcggattagtcgtatcatcatgttcttcagacgatgtacttcaaagagaaaacaacgaacagccaaacattgtaaaaagaaacaatgaaaaagctcgtgaggctggtataagattattagaatcatttggaatgacaaaaactcgttcattaagtactagtgactatccggactattatgggggaagttatattaacgggaatggtaaacttgttgtttttcttaaaggagaaatagaaagtaccaaagccactcttataaggttaataggtgagaatgatgtcatatatacacaaggcaattattcttatacggagctgaataatgttctaaccaaaataacttcatttatt

SEQ ID NO: 8318 - DNA, 12818 bp, Unknown
  gut microbiota DNA sequence
tacagaagataatacggatgagatatgcatcgaatctgtagaagaactttataatgaaatcgagaaatcggtagctgccggatttatgaaatccaatccatacaaggataaaggtttcgtgccgggtcaatattcggaagaaaattatgataagattgatcttcaccgtccttatgtagacgacgtcatattggtatcgaaagatggcaaaccgatgaagcgtgaatcagacttgattgatgtatggttcgattcgggtgctatgccatacgcgcagatccattatccgttcgaaaataaagaactgttggataaccgtcaggtatatccagctgactttatcgcagaaggagtagaccagactcgtggttggttctttaccttgcatgctatcgctaccatggtatttgatagcgtgtcctacaaagctgttatctctaacggtttggtactcgataagaacggtaacaagatgtccaagcgtttgaataacgctgtcgatccgtttactacgattgaaaagtatggttccgacccgttgcgttggtacatgattaccaattcttctccgtgggataacctgaaatttgacgttgaaggagtggaagaggttcgccgtaaattcttcggtaccttatataatacgtattcattctttgcgctttatgcgaatgtagacggatttgagtataaagaagcggatgtaccgatggcagaacgtccggagatcgaccgctggatcttgtctgtattgaatacattaataaaggaggtagatacatgctataatgaatatgaaccgacaaaggcaggacgtttgatctctgattttgtgaatgataatttgtccaactggtatgttcgtctgaatcgtaaacgtttctggggtggtgaatttacacaggataaattgtctgcttatcagacattgtacacttgtctcgaaacagttgccaaactgatggctcctgtatctccgttctatgcagaccggttgtatactgacttgattacagcaacaggacgcgacaatgtagtttctgtccatcttgccgaattcccgaaatatcaggaagaaatgatagacaaggaactggaagcccgcatgcaaatggcacaggatgttacatctatggtgttggcattgcgccgcaaggtgaatatcaaggtacgccaaccgctacagtgtatcatggttccggtggtagatgaagagcagaaagctcatatcgaagctgtgaagaacctgattatgaatgaagtgaacgtaaaagaagtcagattcgttgatggtgcagccggtgtattggtgaaaaaagtgaaatgtgactttaaaaagctaggcccgaaatttggcaagcaaatgaaagcagtagctgctgctgttgcagaaatgtcacaggaagccatcggtgaattggagaaaaacggaaagtatacattaaacctggatggtgcggaagctgttattgaagcatcagatgtcgagatctttagtgaagatattccgggatggttggttgccaatgaaggcaaactgacagtagcgcttgaagtgactattaccgaagaactgcgtcgcgagggtattgcccgtgaactggtgaaccgtattcagaatatacgtaagtcaagcggcttcgagattacagacaaaataaaaataacaatctcgaaaaatacgcaaacagatgatgcggtaaatgaatataatacttatatttgtaaccaggttttaggcacatctcttgaacttgtagatgaagtgaaagacggaacaatgctggagtttgacgacttctcattgtttgtgaacgtgataaaagactaatactatattgattaaccttttaaaattgtaaagttatggcagaaaagactagatattcggatgcggaactcgaggaattccgtgccattattatggagaaactggaattagcacaacgtgactatgaacagttgaagaaaagtttgatgggactggacggtaatgataccgacgatacatctcctacgtataaagtattggaagaaggagctaatacgctctccaaggaagaaacgacccgactggcacaacgtcagctgaagtttatccaaggattacaagctgctttggtacgtattgagaataaaacgtacggcatttgccgtgaaaccggaaagttgattccggcagaacgtctgcgtgctgttcctcatgctacattaagcattgaagcaaagaacagtggtaaaaaataacagatagcaagtaggctacaggtaacgagctacaagtagctgcgcaaagtttacgcacggcacttgtagctcgttatgtttaacttataataaacacatgaagaaactattcacgaaggggagaattgcccttctcgttatcttttccgtattgattattgaccagatcatcaaggtctggattaaaactcacatgtactggcacgaaagcatacgtgtgactgattggttttatatctattttaccgaaaacaacgggatggctttcggtatggaaatcttcggcaagttattcctgacaacattccgcattgttgcggtagcattgatagggtggtatctctataaaatcataaagaaagggttcaaaacaggttatatcgtctgtgtggctcttattctgaccggtgctttggggaacatcatagatagcgtgttctatggagttattttcaatgaaagcactcattcgcagattgccagtttcatgcccgaaggtggtggatattctacctggttttacggaaaagtggtggatatgttttactttccgattatagatacaaactggcctacatggatgccgtttgtaggtggagagcattttatattctttagtccgatctttaattttgcggatgccgctatcagttgcggtatcattgccttgttactcttttatagtaaatatttgaatgagtcttatcattcgctggataaagataaaaaggaagctacggatcatgaaaaataaatttcggtttcatctgtgtctcatctgcatgttcgtttttgcggtagccgggtgtaaagtgaaaagacccagtgatgtaatctcggaatcgaagatggagaatttgctgtatgattatcatgtggcaaagtctatgggagataatttgccttatagtgagaactataagaaagcattgtatatcgacgccgttttcaagaaatacgggactacacaagctgcatttgactcatccatggtttggtatacccgtaacacagagattttatcgaaaatttatgataaggtgaaaaaacgcttgaaagacgaacaggaacttgttggcgacctgatagccaagcgtgataagaaaccgaaaatgactaagcagggtgatagcatcgatgtctggccgtggcagcgtatggtacgtctgaccggtgaaatgatggataatcaatatgtatttactttgccgaccgactctaactacaaagaccgggatacactggtatgggaagtgcggtatcgtttcctggagccgatgcttgccgactctttaagaggtgtcactatggctatgcaggtgatttatgaaaaagatacgatcaatcattggaaaatggtgactgaaccgggtgtgcaacaaattcgtttgtttgcagacacattaggttcgatgaaagaaataaaaggtttcatttattatccgatggatagccaggaaaaaggcggagcagtattggccgaccgcttcatgatgactcgttatcattgtacggatacgctcgcatttgctgtacgcgattctttgaataagatagaagcattgaaagcggattctttgaagaagatagctactaaagaaaatgccgactctttacataaggtcatagacaagaataaagatgacattcagcgtctgacaccggaagagatgaaccgtcgtcgtacgggaactcatcgtgagaagaagccggagcagattcaggtggaacagcatatccaaaaggaacggatagagcaaagaaaagaacgccagatgaatcaacgcaggcaacaacaaagacgttcaaacaactgattgtaatgaaacgctttgcttctcattatttgctgatacctgccgtcggatatatgaagcagcaggtagtggagatcactgacgaaggagttgtccgaggtgtgttcccattgaccgaagagattgaatcggttgaatggatgccgggagtgatagtgctactttctgaaagtcagatggaagaaataaaaaacactgggatgattttaaaaaacatcccagtgtttcaaatcaatcttcccagtgtttcgaatcaatcttcccaatgttttaatgagtatctgcaggaagcagaaaagaagggggaagctttattcccttatttattttatccttttgattttacttccatgcagcctgtcgacggaactcggcacagattactgcggtagcaatggctacattcagagactcggatgtctcttggcctgccgggtaattggggatatataattttcggttgattaatgtggctacctctttccctatgccattcccttcatttcccattacgatcaagccattggtcgacaatggttgttcatacatattttttccatccaggaatgtaccgaacacaggagtatctccgagcgaccggataaaatcggggagggaggtataatgtactttcacccgggcaattccacccatagtggcttgtatagtcttagggttatatacatctaccgtattctgcgagcagataatatgttcgatgccaaaccagtcggccaaacggataatggtacccagatttccgggatcttgtacatcgtccaatgcaaggcaaagtgatgaacgaactgcctccggatccaaagtatattgtggttgttcgaaaatagcaagtacctgttggggagttttcaataaactggcccgtgaaagatcttcctgtgaaacttctaccagttcacttgcgtcaatacccggatgctcctgaaaccaggagggagtggcagctaaaaaacgacagggaaaatgtccgagtaaatcgcctaccaatttaggaccttcagccagaaatacccgctcttctttacgtattttcttcagttccagcgagtggataaactttattttgtttttacttaatgatgccatagatttgatattcttttgcaaagctataaagatatttccaatctatccttactttcctctctttttcttaaattattttccccgtcagaaaatataatttatctttgtaagcgcatttttcatgctatcgatgtaaaaccgtatgaggagaaattttctttatttgcttgcttctgctgctgtcttgtcacttgcttcgtgtactaccactaagtttgtgccggatggatcttatttgctggatgaagtcaaaattcgtacggaccaaaaaaatatacggccttcttccttgcgcatgtatgttcgccaaaatcctaatgccaagtggttcagtctgataaagacccaactttatgtatataatctgtcggggcgtgattcgaccaaatgggggaataagttcttgagaagaataggggatgctcccgtaatatatagcgaggacgaagcgcaacgttctgaagaagaaatcactaaggctgtgcataatatgggatatatggcggcaacagtgaaacgttcgaccaaagtaaaaaagaaaaagattaaagtctattatgacgtaacagcaggcaagccatacgttgttcaatctatcaaatatgatatttatgatcctaaaatagctgcgcttctcaaacaggattctgccagaagtttgctgaaggaaggaatgtattttgatgtgaatgtattggatgcggacaggcaacgtatcacgaataagttacttcggaatggttactataaatttaataaggactatatcggatatactgccgataccgttcgtaatacttataatgtagatctgactcaacatttgcagatgtataaagctcatgcgaatgattcggcaagagcacatcgacagtattggatcaataagattaattttattacggattatgatgttttgcagtcctcggcaatgagtagtgtggacatcaatgattcggtgcattataagggatatccgatttattataaggataaactctatttgcgccctaaagttctcacggataatcttcggtttgcttccggcgacctgtataatgagcgcgatgtgcagcagacctattccagttttggacgtttatcggcattgaaatatacgaatatccgttttattgagactcaaataggagattcaacgatgctcgattgctatgtgatgctgaccaagagcaaacataaatcagtggctttcgaggtagagggaactaattctgccggtgacttgggagcggctgcttccgtctctttccaaaacaggaacctttttcgcggatcggaaacttttatgataaaattccgtggagcgtatgaagtcatttccggacttcaggcaggttattcgaataataactatacagagtacggggtggaaacgagtatcaacttccctaattttctgttccctttcatttcctctgattttaaacggaaaatcagggcgacaacagagtttggtttgcagtataattatcagttgcgcccggaattcctgcgtacgatggcttctgccaactggagttacaagtggacgcaacgtcagaagatacaacaccgtattgatttgattaatattgcttttctatatttgcctcgtatctctgacaggtttaaagaagactatattaataaaggacagaaccatattttccagtataattatcagaatcgattgattgtaaatatgggatatagctataattataatagcgtgggagggtctattattaacaatacgattgcttctaattcatactccatccgttttaatttcgagtcggcgggaaatataatgtatgtcctgtctaaggctaccaatattcggaagaatagtaatggtgaatacgctattttgggaattccttatgctcaatatctgaaaggagagtttgattttgccaaaaatatcagaatcgaccatcgtaactcttttgcgtttcatgccggtgtaggaatagctgtaccttatggaaatgcaaaaacgattccgtttgagaaacaatacttctccggtggagccaatagtgttcgcggatgggctgttcgcgatttgggaccgggttcttttgccggaaatggaaatttgctcgatcaatcgggagatattaagctggatgccagcattgaataccgaagcaaattattctggaaatttcagggagcggcatttattgatgcaggtaatatctggaccatccggagttatgccaaccaaccgggaggagttttcaagtttgacaagttttataagcaaatagccgtggcctatggactagggcttcgcctggatttagatttctttatccttcgttttgatggaggtatgaaagctgtcaatcccgcctatgaaacgaagaaagaacatttcccgattattcatcctaaatttagtcgtgactttgctttccattttgctgtgggatatcctttttaaccagccatttattattttctcttacaaattggagggtatcttgcagagagctcatatattctatttttccttcaacaggattaatgacgaatgtattttttatttggcaaacaaccgttgcttcctctgaattagcatctatctcactggatataacagaaacttttgcagcacctcgtgtcttgagtagatcaaggtgagtctgtcggacattggacgctaaaaagctaagataggacagggaagaaggtgtactccatgcttgggcggccgggtaattgaaattatagaaggcttcgcagaaatctatagctgtttgttctatttgagtttgaggagtttgttgctggcaggacagacaagtgaatattaggacagaatagataagtgtatatagtttattcatagtataaaaagatgctggatggaagatgagattgaaaaaggagatgaaactacttattgaagtttcatctccttcgtatttcttttaatttttagcgggcggcaaacataagattgctcattgtagcttggcgtgctgccagcataccttgagcatccaacgttacattcatcttttcgccattcggtaagaacaaatcagcagtgccgtcattgttcatttttactaattcagcgctttcaccgtttgcaacaacattccatgtgttagcttctttgttgtagatcaaatccattgaagcagtttcgccttctttagtaatagaatatccattctcaagagttttcaccatgtagttgccgttctctccttttactttctttacgtcacctacattagccatcgggtttgaaccactccagaattcgatagaattgataactaaagcatcagccaggtaagctacgccataaaccggaacaatgttgaaagcaaggaatacgagttcgtttacaaacttgtttccaactgattgattccaagaagacaggcggttgaataaactgaatgatcctacacaagaactgaataataagctaccgctaagcactactgcgactaaagtcagtttccctcttttcatgttaaaacatttttgattaataaaaaatattgataatttctctcatacaagtatgcaaatataatattttttaattaatcagggggattatttctaatttttgtatgctcttgattttcgtcttgacaattcgtttcctatgatatggtctattgaaaatttacccggaccggcaatatacatcaatatgaataccactaaataaatgaaagctagctctttaacagcaaatacatcatttgcgtgaactacaaagaaagctactatcatcgtgaaaatcatcgggatcatggctaagcgatacaagaagcctacaataaatgccattgaacatacaagttcaccaaaaatagctaatccgagagacaggggacttcctattccaagcggatcaggaaatacagttgacaactcttggaaactactccatttttggataccatggttcattaataatatgccgaagatgatccggacagccaatagcaacaaagacacttttgttgtattcgattttgtggggaataagaaatcataaatcataagtcgttctatttttaagtttatctctatttatataaacataaaaaatcttgaaattgttctttgctgatagcacaacttgtagaatctctgccagttcttcggttattccttgtttatgaataaataaactttgtatctttgtggaaaattctaaagatatggcgcaacatacttatgacaatgaagctgttcaggagttattgaactgggcaaaaaagatgatcgaaacaaagaattatccaactgaaagatatcaggtcaatcaatgtactacaattattgatggtaaatcgtatttggaatcgttgattgctatgatttccagaaactgggaaaatccgactttttatcctactattgagcaattatgggagttcagggaaaagtgggaaaacaaagaatcgtagtaaatggccgttccatgttgggagataagttatttcatcatatagaaatgcactcttaatcatgtcggataagagtgcatcatctattttttgtatatctgtcggcttgctatttatctatttattagaaaggcagccatctttttttcttttttgatggcgtcttttcctcttctccgttttggccatagacatctgcaaacgtctttttctctttaatcattgcataaatgactccccaatccggcaaaccgcctaagttccggtcgtcaatgaacatatcagctttcaactttcgtgaaaatccctgatggcctttttgctcttcaggataatccttattaacggcataaaattctaaacctctggctttgcaccattcgacagcttcgtccaaaagtgccccttcacgcacactccatagtattaaacgatgcttttcttgttgcaataacttcaatgtgtcaacagcgaatggaatttcttcaccaatgcgtggataacgatgttctacaatcgttccgtcaaaatcaacagctataatcatagtttttaattacctaattttgaacaaagatacggacagtaagccaaaaaaacgtatctttgtctcaaattaacattttaataaattaataaatacatgaacaattcccctcagcgtgctgctaaaggctttacgagagcattttgggtcagcaacacagtcgaactgtttgagcgtatggcatattatgccgttttcatcgttctcactatttatctatcttccattttaggttttaatgattttgaagcaagtatgatttccgggcttttttccggcgggttatatctgcttcctattttttccggtgcttatgctgataagatcggtttccggaagtcaatgattatagcattttccttattatccattggatatttaggattgggagtattgcccactttgctggaagctgccggcctggttagttatggcgtcactactcaatttaatggtttgcccgatagctatacccggtggattattgtgccggtcttgtttgtacttatggtgggagggtcttttattaagtctatcatttctgcatctgtggccaaagaaacaacggaggcaacgcgtgcgcgtggttattccatcttttatatgatggtaaatgtgggcgcttttaccggtaaaacaattatcgatcctttgcgtaatgtcattggtgagcaggcgtatatctatattaattatttctccggtgcgatgacaattattgctttgcttgctgttattctcctttataaatcaacgcacacggctggtgaaggaaaaagtctccgtgagattgggcaaggatttatgcgaatcatcaccaactggcgtttattgattcttattctgattgttacagggttctggatggtgcaacagcaactttacgccactatgcctaaatatgtgatccggttggccggcgagacggcgaaaccgggatggattgctaatgtgaatccttttgtggtggtttgttgcgttagctttatcacgcgtttgatggcaaaacgcagtgcgattacttcgatgaatgtgggaatgtttttgattcctttttcggcgttgctgatggcatgtggaaatttgctgggaaatgatcttattacaggcatgagcaatattaccctgatgatgattgcaggtatagtggtacaggcacttgccgaatgttttatttcgccgcgttatctggagtatttctctttgcaggctcctaaaggcgaagaaggaatgtatttaggattcagtcatttacattcctttctttcttccatctttggttttggtctggcgggaattctgcttaccaaatattgtccggatcctgctttgttcgagacacgggcggcatgggaggcagctagcgcaaatgcccattatatatggtattactttgctgctattggcctgattgccgctgtagcgctactattatttgcgaaaatcaccgaatccatcgacaaaaagaaggaatcttctcagtaattctattcttttttatgtatatttgccgtcactttgctgtaaaagttgacggcattttgcattttaataaagaggataaaacatgaaagtaaaatttataagcctggcgagtggcagtagtgggaactgttattatctgggtactgaaacctatggaatactgatagatgccggaatcggtatacgtactatcaaaaaaacactgaaagattataatatcttgatggatagtattcgtgcggtatttataacgcacgatcatgctgaccatatcaaagctgtgggtaatctgggagaaaaattgaatattcctgtttatacaaccgcacgtattcatgctggaattaatcgtagctattgtatgacggagaagcttagctcgtcagttcgttatctggaaaagcaagagccgatgactttggaggattttcatatcgaatcttttgaagtgccgcatgatggaacggacaatgtggggtactgcattgaaatcgacggcaaagtcttttccttcttaacggaccttggggaaattactcctacagctgcccattatatcagtaaggcccattatctgatacttgaagctaactatgatgaggaaatgctcaaaatggggccttatcctcaatatttgaaggagcggattgcaagtaagaccggacacatgagtaactctgatactgcggagtttttagcggaaaatatcactgaacatttgcgctatatctggttgtgtcatttgagtaaagacaataatcatccggagctagcttataaaacggtggaatggaaattaaagaacaaaggtattcttgtaggtaaagatgtgcaactacttgctttaaagcgaaatacgccttccgagctttatgtgttcgaataaagacgaaaaaagatagtaaaaaagctgcatgattgtttggtcaaataaaataaaagacctacttttgcaaccgcaaacgaggaattaagcactcttagctcagttggtagagcaactgactcttaatcagtgggtccagggttcgaatccctgagggtgtacaaattcaaggttgcaataaatacatgttgcactcttagctcagctggtagagcaattgactcttaatcaatgggtccagggttcgagtccctgagggtgtactaaaaagaggt

SEQ ID NO: 8319 - DNA, 1538 bp, Unknown
  gut microbiota DNA sequence
ctgcttttcgtcgttttcttgtcgtttatttagtttctctatgtcagttgtatatatctgaaatgctttttagtacttttctgatgaggctattgggtgtcgtttcatctcggtggaaaatgctgcatctttgcatcgttaacgttagcgaagtgataattaaaacagtattcattaaaaaaagaaaagtagtatggctattagatttagaagggtgtctcgcctgtgtgaccctacaaataaagaagcaggaaagaaagtgtatccggtgatttcttatcagtatgatacgagtgcaacgttggatgagtttgcaaaggagattgcgtctgcttctggtgttagcgagggtgaaacgattagtgtattgaaggatttccgtacgttattgagaaagacattgctgggtggtcgttcggtaaatatcgccggtttgggatatttttacctttctgctcaaagcaaagggacggagaaggcggaagaatttacaatcgctaatatttcaggacttcgtatctgttttcgtgccaactcggacattcgtctgtttaccgggacgactacccgttcggatggattgaagttcaaggatttggatcatattaatgattcgggtagcattggtgacggttctgatgatggaggtgaaactccggatccggatggtggttcgggtggtaatggtgaagcaccggatccggcagcttgattcatagatcgttgagaactgtctggtttgtatggaatggggcttcggcctcattctttctttataactacgtaaaaatataaatatgcaaataactacaattcttgcttttattaccgctatgggtggtttggaagctgtgaaatggttagtgaggtatatcacttgccgtaagacggatgcacggaaagaggaagcgtccgtgaacagtatggaagaagaaaatcgccgtaaaaaggtggactggctggaagaacggctgactcaacgtgacgagaagatagacgggctttatattgaacttcgcaaggagcaggaagagaagattgactggatacataaatgtcatgaagtggagttgatacagaaggagtcggaagtgaagaagtgtgagattagagggtgcgtgaagcgtatgccaccttcggattattaactggtgcgtttgaactaataatgaattatcatgagaaatatagattctatcatagtacattgttcggctacgaaagccgggcaggattttactgccacagatattgaccgttggcaccgggaacgtgggttcaatggtatcgggtatcactatgtgatccgtttggatgggaaattggaaaaggggcgtgatgtcgctttggccggtgctcattgtaaaggttggaatgagcagagtatcgggatatgttatatcggcggattggatgagaacgggcgtccggcagatacccgaacgaatgctcaaaaacgggtgctttatcagattattatggatttgcagcgggaatataatattctccaagtgttgggacatcgggatacttcaccg

SEQ ID NO: 8320 - DNA, 588 bp, Unknown
  gut microbiota DNA sequence
gccgaataagcattggtcaataagggttcggcaggataggctttatccaggttctggtttcctaacgtaccgtaagatgctttgattttcaacatatccagccatttgatgtctttcataaattcttcttcagacatcaaccaacctccacccagtgagaagaagttctgccattcattgcctgtgtaggagaaagcggaagaaccatcccggcggaaagatccgttgaacagatatttacctttatagttgtagatcacacgtgcaagtacggataatgtactgcgttcccattgagtacttccattggtagcggtagccgcatcgccgatgctaacaaaccatttgtccggattatccggaataaccagtccgaccccctgcttgcgtgctccgtccaatcggctcaacgaattataataggtagtaaaaccggcggtagctgtcaggttatgatttccattatcaaagctgttggtgtatgtcaataaatagtcgctctgaacttttgtttcattctctttaaactggctgacctcggtcttgcctgttcccaaagtagagatccctccgttgacagcggcatcg

SEQ ID NO: 8321 - DNA, 3592 bp, Unknown
  gut microbiota DNA sequence
ggatcggagaaattatatagtctgaaagtgtataacgcttccgaaacggctattccggacatgatcctttgtaaaccgttacagcagtatattaatgccaattttccgggtaccactacgaaagtagggctttatcgtaccatagtagaagcggaacagaacgtttcaccctctaaccgtatgaaagaaaatgcgtagtctgtttttcacaccaaaaccggaagatgtgccggaagaaccggtaaacgaccggcaaccggaagagaaccgggccaatgatagcccggacaagcatataaaggcccgccggacgaaaaacgttcattttgaccggcgagtaaaatcggagctgcacctggaagagtgtttgccctggcattttgagaaaggggcgtcttatcactgtatcagtcatggggacgttgatagccttacttatcttcgtgtgatcgtgaagcaacaaccggtggaatatgttctgatttctacctggtgtatggcaattaccgatgttaaggaggtggagaaatggctggagagaaaagacatagggcgcgcggatttttatgtaggtgaaatctttcaaggttcctacgcagatgtttatttatacctaaagaaggtggcggagcgtttcggatcacgtgtctgtatcttccgtaaccatgctaaagtaatggccggttttggtaacgcttttgattttgtaatagaaagctcggccaatataaacaccaatccgcgcacggagcagacctgtataacgatagataccgggttggctcgcttttataaggagttctacgatgaaataaacaatttcacaaaggattttgataattggaaaccatatacactaaaaagagaccgagcaaatgacgaagttatttaataaaggcggtgacggtgccggtgaaatagtccgtgttttgggattgatcgataatgatcttgattttaccaagtgggaacctatcttaccgctgggtattcgggatttacaggctatcatcggaacggaacccatagacgcggtagataagtattaccgtgaagatcatgcggacgttacggaaccggacggcatggcggaaactttgcggctgatgcagcaggcggtagcgatgtttacctggttaaaggtcattcccactttggacgcacaacacggaacggccggacgtggcaaacaccttggagagaatgaaacgggtatgactgccttacaggagttcaaggatgaagagaatatccggaacctggcttatgaagccgtagacgcgttggtggagctaatggaccgcgaaaagtttgatttctggatgaacggcattaagaaaaaggctataaaccgacttctaatccagaataaggaaacgttcgatgaatattataatatcggaagtcaccggcttttcctggtgcttattcctatgatccgggaagtccaggacgggcagataatacctgttatcacccggaaccgttataatgaactgattgaaggcgataccgttttaacggagaaattgctggagtatgtacgccgcccgcttgcacttctcaccataaaaaaggccgttgaacgtttaccggtggaagttctgccaagtggaatcgtacaggtacagcagagcacaaccgtacgggataaattgcgggcggaaaaagaggcccggcaatcggttgctaacagtctggagcaggacgcggcggcttatctggatgtattgcaggatatcatcagggaactggatgcgcagtcggaaacgatggattactatataccgggtgttaccgtacaatccaaaggaataaccttttaatgtccggacatggagaagtttacatataatagtaagacggtggaggttccttcctgtctggatgaagtcagcagtgagcagtaccggcagtttcttatattgtcggtactgatgaaccgcggtacgatcagccccggacagttccgcgtaaaatggctttctttccttctgggcatgaaagcggattacaccatgtaccggcgtgagatcatccgagagctggacggtcaactggaaaagctggacggctttttctcttatacaaccggtaaggagggcgagcggatcgttacgcctattctgaaaaccggtcgtaacctgatgcaggatttcgggggctggcatggtgtcggtgacatgctgaacggtcttactttcggtaacttttgtgattgcctggatttgttgcagcaaagcaaacaggcggcagcagaaaaagacgatccggctataaatgaattcttccaggatatcacgttaaagctttaccgatacaaggacccggagaagacgccggccgttccttccttgcttgccattcatgcggtaaacttcttttccgccgtttgggaaatggttctttccggaccggtttatatcggtggtgaagctatcgactttcggatattgttccagaagctggcatccgaggaccggaaggcggacgataaaaccggctggaccgggatagtctttgaggtggcggcttccggcgtgttcggaaataagaaggaggtggacgatacacccttttgggatgtattgctttatctgtataaatgtaagtttgagtatttacaccaaaaacgtaacaagaaatgagaacgacaacaggaacaaaaaacaagatcaagaaattcgaggggttacgcctgaaagcgtatgtatgtgccgcgggagtatgtacgatcggttacggtcacacgatcagcgtaaaaccgggtgatgttatcaccgaggcccaggccgatgctttctttgaatcggatatcagggcggtagaaaaccaggtaaacgcgcttccccttcatttgggacagtaccagtttgacgcggtagtaagcttttgctttaatgtaggtatcggaaaattcaagaaatcaacgctttataagaagatcagagcagatgcgtatgattcatccataccggcagagtttaaaaagtggatatacgggggcggtaagattcttccggggcttgttacccgccgtgaatgggaggcgaaacgttatcagggattgacgatatgatagatataaaggtttaccgtgaatactgggaaggcatacaaaaacgtattcctgaaataaagaaggtgctgcccgttaccattgacgaggaaatgagtaagacgatacagggactatctaaagaagaatgtccggtgctctttattctgatcccgtcgggaacgggcgccagcctttcggctgataatgtgagggaaaataatttatgcgttattttccttatgagcaagtacgatccccaacggaaaggggcttatgagactatcgaagaggtgcagccggttatggagcgtatcaaacaaatgctgatagaagattctgccaccggttgccctgtcactaaggaactggatttaaccagcctttccactcttccggaatccggcttttaccggacgtttgcggggtggagcctggctttctcatttaaaacaagattctaactgaatggccgagaattttaaaacggatttttttaccgaccggatcgggcgtggaatacaggacatattt

SEQ ID NO: 8322 - DNA, 2765 bp, Unknown
  gut microbiota DNA sequence
ctgaaatcttctgtctcgtagttatagctgcagatgccctgatcggtagagatccatagaatgttacggagcgaatcgttatataagcgtgtgatgaaattgtggcggagtgaggtgctgtcggcttcattatgtgcgaacaggttgatattataaccgtcatatcggcacaatccgttgcgtgtaccaaaccagatgaacccgtggttgtcctgggtaattgcattgatcgtattatgcgggagtccttcagctatacttagctgtttgaagcgtatattattatattgaatctgtcccgtcgacaagcttgtatttaagagcacgagactaaataagagtacgaatttaagtaaggtggttctcatggcttttctgattgattttcacgacctaaagatacgtctttttttgttttgaacagtcgtagaattgttcaaacgggcagcactcatgttcagtttgccgcttcgctacagatttttatacatgattgcaggtattaagcattatttttctgtttttcttggatagaaaagaccacatttgcaatgtgaaactctaaaaacaaatgctatgaatcattcgacattcaaatcctttacgtttggtatcggtctgtttttcacattacctctggtatatgggaatagttcctctccgtcttcctccgatggaacgttgtatatcaataaatcgaaaacccacaaagtggctcccgtaaagtacggtttccattatgaggaaataggaatgatgggcgagggtgctctgcacgccgaactgatacgtaaccgttcgtttgaagaagctacaccgcctgccggattatctgtgaagaacggtctttatgaaaatgttccggctccccgcgttaaagagaaaaaagtgtttcaggccgatccgctgattggatggacaacttatccgttatcatatactcctgtatttatcagtcgcacggatgaaaatccgatgagtggggaaaataagtattcgatgctggttaatgtcacggaagatattgcgaaccattcggatgccctgattctcaaccgtggatattatggaatgaacctgaagacagatacgtcttaccgtctttccttgtttctgaagaacaggaattattccgctccgttacgtgtatttctagttgacgaatggggacaacgggtgagcaatgtgatcgaagtgaatgtagggaatcgggactggacaaaatataccggtgaactgaaaccggaaaagaacgtccggcgtggaatgtttgccatacaaccgatgtcgaaagggcaatttcagatagatgtcgtttccctgttcccgtccgatacctggaacgatggaaaatccgtattccgtaaagacattgttcagaacctgaaagagttttctcccagctttatccgttttccgggcggatgcatcgtgcacggagtcaatgaagaaacgatgtatcactggaaaaagacgctcggaccgattgaaaatcgtccgggacagtggagcaaatgggcgccttattaccgtaccgacggaatcggctatcatgagttttatgaattgtgcgaatatgtgggagctgatgcgatgtatgtgatgcctacgggtatgatttgcagtggttgggtgaagcaaagtccacagtggaatttcagacacattgatgtcgatctggacgcttatatccaggatgcgttggatgccatcgagtatgccattggtgatacaactacgaaatggggagccgaacgagcaaagaacggtcatcctgctcctttcccgctaaaatatatcgagattggaaatgaagatttcggacctgtgtattgggaacgttatgaaaaaatctatcaggcattgtccgccaaataccccgacttggtttatatagccaatagtgtcatccgtgtagtcggaagggagaatgacgacaaacggaaagatattcccaattttgtcaacccgaagaatgtaaaagtgttcgatgagcattattataactcaatcgaatgggcttgcgaacagcattatcgttttgataactacaaacggggtgttgccgatctatttatcggcgaattgggtattagcggaaaatatccttataacctgctggctaccggagccatccgtatgtcaatagaacgcaacggcgatttgaatcccttgtttgctgaacgtccggtgatgaggcattgggactttctggaacaccgtatcttcctgccgatgttgattaatggagtagacagtagcgtaaagacttccttcttctatctggcaaagatgttcagggataacacgtttgacgtgtgtctggatgcagcgatcaaggatatagaaggtttgcagaacatctttgttacgatgggatatgatacggccagcaaacaatatatcctgaaactgataaacctgcaggataaaaaagtcactctacaaccggaagtttccggcttcaaacgtcccgtcaaggcacataaaacaagcctggtactggttccgggaaaagaaaacaccccgtttaccccgaatgaagtccaaccggtagagacggaagtcggactagacctgaatcagccgttcgaattggaagccgcttccatggttgtataccgttttaaattgaaatgataaatgggaatttagcggttaaatgagaatttagcggttaggctgaaagccttacaattatatatttattggggtgccctgaaagggcttaattatatagcgtagggcaacgccctacgaaaaaa

SEQ ID NO: 8323 - DNA, 2180 bp, Unknown
  gut microbiota DNA sequence
gttctcgcagcttgtggcatcttcttctctttgttcggtgcaaacagggcaggcaaccattttcttagttaccgtttgcttttcttctaaccattcaccacagtatttgcattttttggctacagccaaaatctcttctccgcaaaaagggcatttttttgtttctttttccatagtatcttatttcttttgaagtgaagaaattgtatataaaacattttttttctcattgacaaagaatgaaactttcacgctaaacgttttttttccttcattattacggaattgataggtgaagttggttccatctattctttgaatggtatattccccaattaatgatttgttatcagtacgtaattgttccagatatcttttccctgcatttatttccggactgttgctatccgccatttcttgatataccgttccggtgaatttggcacccaattttgttttaattctattgtaggtgttcaaatcaatttctcctttgcgtagcctttcttgtgctatacggagtttgcttgcattggctatcatttctttatatacaggactgtcagtcggctccagctgttttttaagtcctaatttctgttttatgtattcttgggttttaggtgattctttttgtatctcatatttgttattcagaaaatcttgttggcataaaaaagtcatcacgtctatgcgaaaacaacgttctttttcgctattgtttttattgtttttagccggatggcatactcctactaattttccattcagataggcattttggtctattacttgatattggggaaatagtgaatttacttggtaatgctcttctttaggatatgaacggtctattgtttcccattttcctttcttatcatgtaaccattcccatgtttgggcggcccgaattaaatataaagaatcagctattctttcttgtactattctttcggcatcattgaccttttggatggagtctactcttttttgttctaactctttcttgctaatagcattttctatttctactttgattttttcgaattcttttgatttagcttttaaactttccattgattcacctaagtaaatagttggaaatttatatttgaaatcttctaatttatatattttgcagattcttagaagtgaatctctcgtattttgtaatttttgagagaatacttctgtcttgcttttctttgccttaacgaattttgataagtctactatttgtgcacttgtcttacatattcctgtacagaggaataggcatattaatagaaattttcccatagttaccaatatcttaaccaaaactcgttaaacaaatcgctttccgaatcttgctgttcataatcatttaaatctcccaagcagaatggaatatatccgttctctttacattcgtttgccagcatagccggcatttcatccaaggcggtgattagtatataatgccttttagtattaggcatatactcttcacatacttggtcgaaaatggccttgtatcttgctaattgattatggtgagttggtgtatacgctttgttctcaatcaaaacagcatgaaattcttcttttccattgcatgtaatccgtatgtttgcccataggtcaatatatttccattgtttccaagtttcaacagaagtgacttgcacgtcgtctgtcatttcgatgccaatcagtttgccgagaatctttctacaatattgataaaggataggtttctcttcactgtattgctgtatagatctacgtaatgtccatgaaagaataaagtctatcatggtttctttttgagaatctccttcggaagaatctttcattagtaatgatactttttccatgttttatataatttaaaatgaatgtatgggtacaaaaaaaagagcgtaaaactaacttttagcttatttgattaggtaggttctggtaaaccttatgatccaaataagtaaaagcagtccacgccctattcgggtgtgaacgtcacttcaacttattatttcggatcattgaataaatttaccagatttacctaatcgaaataatacgtcttaacgttcaatcaatatgtctgaaaattttagttctctgtttcttactacttctttttaatgattatacatcacaaaactaagaaacattttttagaattaaaagaattt

SEQ ID NO: 8324 - DNA, 664 bp, Unknown
  gut microbiota DNA sequence
tacggaatacgtttgcgctttactggttggttcataactctttcattttctcacaaaagtaacaataaaaaatgaatattgatggatggcagttatataaatgatagaatatctttagtagtctcaatgccattattgcttatagtgggaaagcggatttgctcttctttagtgtggaaacccgtaatgttgaaaagtggatagctgaagaaaaatagataatacaaaaaaagcggctcgttgcaatgagtcgccttttattataatacatgaaaatatatacgaactttaaacttcttcgcataccaccattttcatcccttgataaacgactataattttgtgtagcgtcgttgttccgattgctttttgcaccgtttcactggcggcatagcggttggcttgtgtgatagcctcttgtcggagttgctctaccttttcgtcactatcctttcctttggcatacttcagttcgataatgtaggaatggagcatgtctttgtatatatccagtaagggaaacatgaagatgtcggcatatccttcctgattctcctgttcggagatagggcgatagaaacggttctgtgcggtcatagccaacgtaaatccatgtacgtatgcttcgcctttttgcttgtctctctgggaagaatatcggtgc

SEQ ID NO: 8325 - DNA, 2655 bp, Unknown
  gut microbiota DNA sequence
gatttaatcagggcacgccgggaaataacaaaacgtttcgacctgatacacttttcttcgtctcacttacttggttcggttcgcttcatgttgctatgcaaatacaagcccgtagcggaataatttttctttgcgcgataacttgataggcggcgaggcgtccggctgtcttgcgtctccatattcggtgatgaacaatacaaagcgggtgcgaacgcttcgggttatggcaagggggcacgatttttattttttgacgcgactctgtgaaacccacttcaccccatctttttacacgcgggatatttttttcgggtgggggtgaccgttgggggtagtaaaatttatcattactcatctttaattcagtagtttagatgtcgtttcttgatataaattaataataaaatatgcgcctttttccgtccaatacatgtgctctatcgttttaatctcacctgttcttgaatcggtgcgggcaaatgtttgataaccttccaatccctttccgcgaaggtcggagtagagaaaatacaaaccgctttgtttatactgtattcctgattcacataggaatttatttaacctttgggcacttattcccaactttgcggctatcgtgttggtagtaatcagagacgacgaagataacacagtatcgaaatactccgcttttggctgcatcgcttcgatagcttttgcgttagcctctctttgtgcacggagcaaggcgttttgttcctgctcgctctttagggtggtgagtaactgtatcagggcgtccggattctggaacatctgcacaacagtttcgggcgtcatatacgcgccatgtttgcgaatacttggcaatatctcttcacatacccaatcttgaaaggcttccgcttgcggtaatttggatcgcattattaatctaataacgtcgccctcattgataaatgacatctctactacctgattcgttactacgccgtgttgattggttgtgcgggcgaccccgtcgcgctttgtcactcgcttgcaatgcttactaattgcatccctagtatttgcgtatcccaatgctcgcgccacatctacagccgcaaataaaggttctccgctttcacttgttgcggttcttacttctccgaatctctcgtttttgaaaatagtaatctcgttcatcttaatttgattttaaattgtgtttactactgtttaaggaatcgtgattcatggagcgtttcggcttcacatactcgaaatgcctttcagagtcggacaaatcactgaacatcatttcgatttcttccggcactggttcaatctccgtatcattgtccggatcggcaacacgaagaaagcaggataaaatatactgcatgatttcgtaattgcttttaaacttgaactttttgcggatttcgtcaagtcgctcccattgcttcgggtcgatacgtaccggaactttctttgtttcccccattgctttgcgccgttcggctttttttattgcatccatagttttaatgtgtcatgtgttagtattcgttttatcattgttataaagcctcatcctgtgttgagttcagccggatcgggcggctttcctctacattttccggtgtttgaattggtgttgtactttttcgcattgaataacggcgggttattggcgtttggcggtggctcgttttccggtgatgaaaatgcaaccgaaacgccctttatcttaattccgttttggttgcacttttcactatttgatgaggcatacaaaaatgccgtttcggtttcacttttagtacttcgttcctgttggatattgtcgctttcatttactttatcatcgaaattttcctttgcaaaaacgccgtttcggttgcatttttcgttatccatgtctcgcagatacttacattctattgaaatgaaattttttaaattctcttttatctgtgtagctccgatccgttcggctaatgcaataaacttctttttcatcctgcatcgtttaaccttgtcaagtgcttgccaatcatcaccaagaaataacgcaaataaatctcgttctttcttgcttaatccttccaatgatacagcctcaacaattacaacatcttccaacgtattgagcaaaagagcctcgagcctttcccaaacatcaatactaagcaagtcgcccaacattggcgtataaatgtgctttttctttaaatatgtatttgtggcgcttatctcgatgcgtagaatactatcaaagcccggtacgccgcactgcttccccttatcgtatatttttagcttatacgaatcggcttcgtagataagtcctatctttcctatcggggtaaatgtataacccttgtacattcttatcgctttcaatattcgttgcggatcatagggcagttttaaatttacgccaaattcgacgctataaagccgcgtaatatccgaattaatcccgtagacttcttttaattcagtcaacacacggcacaagtcagacagccggaaagaatcagcattatgcaaaccgccgttagcgtacttatgtaggcttccgtgtagattacataatttgcggatttctcccgtagttacgtctactctatcagtgaaaccaaatatcagcccctcaatgttgatataaaccgctttagggct

SEQ ID NO: 8326 - DNA, 2222 bp, Unknown
  gut microbiota DNA sequence
ttagtgattagcggggtgacctgccaacttgttttttatatgttactaaagcactattcaaaaaaaaagactatctttgagtacgtttaattccaattatagccatcaatgagaaaacggaatattctaatactattactatccatgataggcatgtatgcttttgcctatccaaatatgattgtagaacactacacggctgaacgtggtttgcctaataatatcgtaaactgtacattaaaaggacaagacggatttatctggtttggtacctggtatggactatgcagctttgacggaagtaaattccgttcctacgataaccatgacggcttttattccacagatattccgccgcgtaaaattcagcgtatcgtagaagataagaatggttttctgtggattaagactatcgaccgtaaactctatctgttcgataaacggcatgagagctttcatgccgtctacgacgatgtgaaagaatattccgagaacattcagattatcaagattcagacgaccgaggatggcgacgtattgttgctgacaaaagataaaagccttttgcgtgcgtacaccgacaaggaaggtaaaataacgatgaaacaattgcatgattcgcgtcctaacgtgaacgtgtacgatatgcgtctgaaacacaacatattctgcgaaacagccgaatttatcaattggatcggtatggattatcagattctgtccctacggaaaggggaagcgctgaaagacaaacctgccgactttatacagaaaaaagtatctgctaacccggatcagtttacttgtgcctcttataattctaaattcttatggttaggagacgagaaaggccacatttatagcattgatccgcaaaacggagtggtcaaccgttacgagataccggaaatcaaacagtcggtttctaatttgctggtaacggaatccggtctgatgtacattaccaccaacgaaggagcatacgagtacaatatcggttataaacagttgaccaagctcccctttaccatccccgaaaaggacaatggaattatattctatgataaatacgataaggtatggtttcaggaaggcaaccaggcattgacctattatgatcccctgaacaggagccaccaccgctttacattccccaatcagaacgcaatcggcaattttgaaatgcaggatgccggcgaacagggcatgttctttatgactccgggaggggaaattcttctattcgacagggagaaactggaaatgacccgtatcaaccaattgaagcctttctccgatgatcttcccaatcagcttttcttccatcttttgctggataaagatggcatcctttggctggcatctacgagcagcggagtataccggcttaatttccccaagaagcaattccaactgctgacagaagtttctccatctccggtagtgcccgaaagatcgacttcctggaatcagggaatacgtgctctcttccaggcgcaaaatggggatatttgggtaggaacccgctggcaagccttgtatcgcctggatcgtaacggacaagtgaaacaaatcttctcggataagaactatctgttaggagccgtatatcatattatggaagacaaagacggtaatctttggttttccaccaagggaaacgggcttgttaaagccgaaccggacatgaattcaccgcacgggttgcgttttacccgttatatcaatgaccccaagaatccgaattctatcagtaacaacgatgtgtactttacctatcaggacagccagggacgcatttgggtaggattactgggaggaggtctgaatctaatttccgaagagaacggagcaattacctttatacataaatacaatggcttgaaacaatatcctgcatacggtctttatatggaggtacgtaccatgacggaagatgaagacggacgtatttgggtaggaacaatggatggcctgatgtctttcgacggacatttcactacccccgaacagatccagtttgaaacgtaccgccaagtcagcgaaaattcaaacgtagcggataatgatatttatgtactctacaaagatactgattcgcaaatctgggtaagtgtattcggaggcggtttgaataaattagtccgctatgataaagaaaagcgtgaaccgatcttcaaatcatacggcatacgcgaaggaatgaataacgatgtagtcaa

SEQ ID NO: 8327 - DNA, 8446 bp, Unknown
  gut microbiota DNA sequence
attacaacgaattaaattttaccatcatgaaacataacaacttacttacatcattcactctattatctcttttgtgtatcttctgcacctcatgcaacgatatggaaatggcaaaaaaagcgtgcggcacatgggaaagcatccgcatagtcgaagaagacggatgcaaagagaaaacctattatgatttcggttctgtgaaagggagtattcctggaggagacttaaaagaaacaacctacttcaccgaatgtggagaagttgaagacggacaagaatataatatgcaatgcaaaagtatcattgaaggtacatggaagatagaagtcggtgacatctatttcacttacgacctgtcgactctgaaagtcacttttgaggggattagtttcccgggcgcagatagattatccgaatctcttgcacaaagttttattaaaaactatgggcaatcactcattcaagaatcaatagaagaattgaaagaacatctctataattggtattcagaaaacgaaaacaacgaagactgttaccagaatgtgaatattaaaggagacaatatgtcgttcgatgcaacagatggagttattaaactgataagaataaaataaaacttgaaaacatgataaacaataccaaacaatgccctttctgtggcgaagagatacaagcaactgcaaagaaatgcaggcactgcggagaatggttggaagactcagtttccaatacaaaaaatcaagccactacagaagtgtcctttcaaagggattcaaataatcataaaacagaagtgaatcatttaaaaactcccatttctgactttgtcctaatcctattttggacaggagtcattgcgacattcatttcaatgtcacatcaaagtggagtatgccaccttaccaatccacacaaatggctacaaatcatgcagtgggcaacctatattccagaatgggtggctgacttattgtctggcttggtcgatataatattcgcttacgccttatatatagggatgaaacaacaaaccaaacccatgagcggcttattaattaccaatattataatcactgtagtagtatcttttttgattttatgtatggatttaatctctattgcagacgaagattacattggaatacttatctctctttttgttatattaggtatgcttattacatcaaccataattggagtccaatttatccgacacttcaacggactattaaataaattaggatggggaatgttggcatctctaatcatagttatatctgccgccgctctaatatcagaagatgaatttagtatgactaatacaattatttcttttattgagttttggataatcagctatattctatatatacaagcggaattattaacggattgagccaactaaatccctcaagaagacattttcatttgattagccttaccaattgcacaacaaaagtgcagaaaattatagttttctgcacttttgttgtgcaattgacgtatatttgcatataaatatataccaaccatggacagattatacgaaaacttcaataaactccttaaagctacaagtaccgatttcatccgatacaagtatactgaaataaactgggatagccatatgctcggacttgttgggccacgcggggtaggtaaaaccaccatgttccttcaacatatcaagcagaacatgaatccgaaagacacattgtatgtttcagcagacaatatgtactttgccgataattccctgattgacctaacagacaaattcagcaaacgaggtggcaagcacctatttattgatgaaatacacaaataccctaactggtctcgtgaattgaagcagatattcgattcttatcctgatatgcaagttcttttcaccggttcctctattttggatatttataaaggaacggcagatttaagcagacgtgcccccatctatgaaatgcaagggctgtctttcagagaatatttaagtatgttccatcaaattcatgtaccagtctacacattagaagagatactggaacataaagttgaaattccgggaatagcacatccacttccgctattcgctgaatatatacaacacggctattacccgtttagcaaagatatcacttttgaaatcgagttgaaccaagtaatcaaccagactatggaaaatgacatacctcaatatgctaatatgaatgtctccacaggacgtaaattgaaacaactgttgatgattattgccaaaagcgttccatttaagcctgtcatgcaaaaacttgctgacatcattggagttagtcgtaattatttaagcgattacttactttatatcgagaaagcggggatgatagctcaagttcgcgatgacacaggcggggtcagaggtctgggcaaagtagaaaaaatatatcttgataatactaatctcatttatgcattaggaagagagaattccaatatcggtaatatccgcgaaacatttttttataaccaaatgcgagttaaacaggatattatatcttccaaaatctcagatttccaaataggagaaagaacatttgaaataggcggaaaaaacaaaggacaacaacaaataaccggagccaaagaaggatacattgtaaaagatgatatagaaaccggatacgggaatattattccactttggaatttcggaatgaattattaataatagccttataacaattttaatacaaaatatatttatgtcacataccagacaagaacagatggaagccttcggacgcttcctggacattctcgacgaactgcgtgttaaatgtccctgggaccgcaaacagaccaatgaaagtctgcgtcccaacaccatagaagagacttacgaactttgcgacgccctgatgagggatgacaagaaagaaatctgcaaggaattgggtgacgtattattgcacgttgctttctatgccaagataggctcggaaacaggagattttgacatcaaagatgtttgcgacaaactgtgtgataaactgattttccgtcacccgcatgtattcggagaggtaaaagcagagacagcaggacaagtttccgaaaattgggaacagttgaagctaaaggagaaagacggcaataagagtgtattgagcggtgtacccgctgccctcccctcgctcatcaaggcttatcgtattcaagacaaagcccgcaatgtaggtttcgactgggaagagcgtgaacaggtatgggataaagtgaaggaagaaatcggagagtttcaagatgaagtggctaatatggataaggacaaggcggaagctgaattcggtgacgtcatgtttagccttatcaatgcagcgcgtctctacaagatcaatcctgataacgctttggaacttaccaatcaaaagtttatccgtcgcttcaattatttggaggaacatactatcaaagaaggaaaaagcctgaaggatatgtctcttgaagagatggatgctatttggaatgaagcaaagaaaaaaggactgtaagacccatgagtaacattgatttaaatgccatcatcgaaagatgatttggagttcataacacatgccaaacaggatattccactattgattgcagaaatagaatacttaaaatcaatgctgtctaaataaaaaaatagaggctctattccgtgcgagtagagcctctattttactcaaacagagcgtctattcatacaaattagacgctctatttttctttatttcttcttcgaatcgtttcctttatccttgccacgattcattccttttatcatctcccggtggaagcgcatttccgcacgctgcacgagaaatatcttcttactggaaagaatctttttgaacttacccagataagtcttatcaagctgatcggcagcaatacgattgttggctatcttatcgttgatttctgcatattgagcttccgtcgtcttatcatctttacctttgcgcatcaaatcccacgattcatcattcagcttcttcttcttatcctggagttcaaaatagacgggaaagaacttggctgcctcctttttactcaatcctgcctgttcggtaatgaattccttttgttttgccctgaactcctcccgggataaatgctgatcacatccgtcagcagcccaaagaacaggcataaagccacacaacaaaacaacccatgcgattagttttctcattttctgtattcaatcagttttaataaatcattctacacttgcgtcactcaaataaacatataacgaataatcatccagcatagcgcggtctagtgccacatccagcatttcgtccgatacaacttcagtatccacctccgtcaccgccacttcatcgatcgcagcaggtttgtgatctgtcgacgctacccggataatcagggccgcacccacaaacatagcagcgagatagagcaatggtttcagtcttgtccatgtgctgacaggttcttccttgaaaactactttttctttttcaggaagtttattcattacctccgaagtcaggttttcaaagtaaccatcaggcactttgaaggaattttccttaccaagcttcttcaataggatatcttcttctttcatacgtttttctcctctcttttacttagacaacgtccaatttaaaaggtttaatctatttcttctaaaaacttctctattttcttcaccgcatgatgatatgacgctttgagcgcaccaaccgatgtgccgaagatttccgacatctcttcgtatttcatttcctgataatatttcaggttgaacaccatacgctgtttttccggcaaagtcaatagagctttttgcagacacaactgtatttcgtcgcccgaaaagtaggagtcactttccagcttctgcacaatcgcagcttcaggatcgtcaatatccacggtagtcatagcgcgctgcttgttcagaaaggtaagacattcgttcagcgcgatgcgatagagccaggtagacagtttcgcctcggcacggaaataatcgatattcgtccatgccttgatgaaagtgttttgcaggagatcgttcgcatcctcatgcgacagtaccatccggcggatttgccaatataattgctcgctatactgcgccacaatcatttcaaatcctttccgctgtgtactctcctcctgaaggagtttcagaacttcgcgttcgttataaggaatcataatctcttgtatctgtatgtttatttatggtttcaaattcaggttgttcattgcctctagtaaagacggatcatatttataaatgtcctcacaatacctcaaattattatcggcagacagataaactgtctgataatctataaataaaggtatatatttctctaaactataatgtttcagttcgcgataggccgcactgacaggcagcttcttcccctcttcactcaccggcttgatatccattgcaatgcggatacggtcttccaataattcatccggttctttcaacaggaagaaagcaaagtcgagtgctttctgaaggcggacgcaaccatggctcaccgcacgattgtttcgcgtgaaagcccaccgggaaggagtatcgtgcagatatacggaatgaggattaggaaagcggaagatgatgcgtcccaatgaattccccgttttattgtcctgcttcaccgtataaggtacaccttttcctgcatatttagcccaattaacctgatgagggtttacttgtaagccgttcttatcgtataccttcatgcgattacgggtgaaataggtcgtatctctgcgataagtagggatgatttctttcctgataatactttgaggtacattccagtacggattcagttccatataataaatcctgctcgacaacagaggagttttatttttcacactccccacacagatacgcatctccaggatagagtccgtttcttcgttgattgcctgcaacatgaatgccgccacattggctatcacatatttctgtcctttgtccaatgcatattgccaacgtgcccgctccatatttaccaacagacgattccggtaataatccgtagtatccgttttcccccaagcatttacacgaaccagttcttcctgcatcttgcgataaagcggagaagaaggttgtgctccatgaagagcagcaattggatttgcacgcaaggaatcgagggcggcatttgcaaaagttacatcacaatgttttaaggggatacgattgatcgaatcattccatctgcgttccgaaggcaggaaaccaaacttcaactggcacacatacgaaagatatgcggctgtcaactgatattccacatctgccaacagacggttcattgtctttccttcctgcaacttcaaagaacgtatttgttgcaatctctcacggatgctatcgaccgaataaagattcgggttaatgccatgccgtgagatgtctcccaaccagaacaacatagagtccgccacctgtgcggcaggtttatcggacacaagcgagtcattcaaccagaagaattcatctttttcccgataatgggccaacaaagccgaatcccagggagttacggggctttcgttcaaataggaacgaatcatcagacgaatactgtcggcatctatttgataagcagggttgaacagttcttgcagggaagccagagagtccggtatcggagattgggggttctctttcttacaggctgccaaacaaacgacgaacaggattaccgctccccaaagcaggcgtctatttctcatacacagttcctccatcaacgtcaatacacatattctctttcgctaaaatggtttgcgggaaaatggcggacgcttcattaagcaaaatagattcatcctcgtaacgggctgaaaagtgtccgatcaccaattgtttcacattggcgtccaaagctagttgtgcggcttgcgcagccgtagtatgataagtttccttggcacgtgcctgctctgtctgcgcaaaggtagcctcatggaaaagcaaatctacattgctgatttgttcggcaagcgacgggcgatagattgtatcggagcaataagcatatttacgagccggagccgaaggacgggtcagacgcaaattgggtattacttctccttcgggagttacaaagtctgctccgttcttgatacggttcagttcatagacggggactttataaaagtccaccatgtctctgataatatggttcggacgctgtttctcttcaaaaaggaaaccgcagcagggaattcgatgttttaaagggatggtggtcacagtcaccgaacggtcatcgtaaatgagcatcggttctttcgtttcgaattcatggaagaacaccttataagtcaaagtcttgcaaaagaaagcaagcatcggcgcaaacagctcttccagtcctcgtggagaatgaatatgcaaatcggctgttcttcccaataatccgaatgtagagatcagccccaacaatccgaaacaatggtcaccatgtagatgagagatgaagatatgattcaatcgggaaaatttcagtcgcgaacggcgtaactgcatttgtgctccctcgccacaatcaatcataaatagtttttcacgcaggttcacgacttgagaggtcgcaaaatgtcgcgtggtaggcaaagcggaaccgcatcccaatatatgtaactcaaatttttccatggtatgcaaagataaagcatttcagattcaatctcgcaaaggaagaaacttttttttctattcaccacggaggacgcagaggacacagagggtaagaagggtaaggaggatatggagaagatgcggaggataagaagagggtagatttatataaataaaatatatcgccatcgttagtttgttaaatcaagccttcaccccctctgtattctccatatccttcctgtcctctatatcctctccatatccttcttaccctctgtgtcctctacgtcctctgtggtgaataaaaaaaggcgcccccaaccgggagcgccttcatctgaaaatattctgttctgattatttctttccttccaactgttctttcaatgcagccagagcgtcgatgtcgcccagagtagttgaagcagcttggttttggatcatcggagaatcttctctcttaccagaagatgctttctttgcgccagaagcagctttcttttctgctctttcttcagctttagctacatcttcgaagatacggctgtgagacaagatgattctcttagcgtctttgttgaactcgatcactttgaattcaagtttctcatccaactgtgcttgtgaaccgtcttcttttacaaggtgtttcggagttgcgaaaccttctacaccgtaaggaagagctacaacagcacccttatccaacatttcgatgatagtaccttcgtgtacagaacctacagtgaa

SEQ ID NO: 8328 - DNA, 1044 bp, Unknown
  gut microbiota DNA sequence
acagaattcaatttcttctgcgatgtctacgcccaatatcttcccgaagggataaaggaagaaatgaataagaaaaaaggagccgtagagcaactggactatctatataaagaatgtgtcaaaaccaatcagcagatttatctgttcattgatgaatacgaccattttacaaacaaaatcctatcagaaccttcctgtctcgaagattataaaagcgaaacacacggaaccggttatctgcgcagcttcttcgatacggtgaaagcaggcacttattctacgatcaaacgttgcttcgtgacaggtgtcagccccgtcacaatggacgatctcaccagcggattcaatattggcaccaattattcgctctctccggaatttaatgaaatgaccggattcaacgaagaagaggtacgcgcaatgctggattattatgccactacctgccagtttcaccactctaccgacgagctgatagaagctatgaaaccttggtatgacaactactgttttgcagaacaaagttatggcagtactacaatgtacaactccaatatggtactctactttgtggataattacatccggaatggaggctatatgccacgcaatatggtagaagaaaacatccgcgtggattacaacaaactacgaatgttgatccgcaaagacaaagaatttgctcatgacgcctcgaccatccagacattggtacaacaaggatatgtcaccggagaactaaaaacaggttttccagccgaaacagttgcagaaccggataactttatcagcctattattctatttcggaatgttgactatcagtgggactttagaaggagaaacgaagttgactattcccaatcaagtagtacgtgaacaattgtacagttacttattagatacctacaacgaagcggacctccgctttgacaactgggaaaaaggaaaactggcatccgctatggcttatcgtggcgactggaaagcctacttcgattatatcgccgaatgtctgcaccgatattcttcccagagagacaag

SEQ ID NO: 8329 - DNA, 1980 bp, Unknown
  gut microbiota DNA sequence
caagctcttctttactccgatagagaaagcactcgacgggctcgatacctggtatgcgaagatgctgaactgggctgtacgtcatcgtccgattgtcattgtgggatgtattgctttcttcattgtcagtttgctgtgcgcaaagggcatcggtacagagttcttcccggcacaggataatgctcgtattgccgtacagttggagcttccgattggtacacgaaaagagatagcgcaggaactttcggagaaattaaccaaccaatggctgacgaagtataaagacatcatgaaagtatgcaactacaccgttggtcaggctgactccgataatacttgggcatctatgcaggacaacggttcgcatattatctcgttcaacatcagtttggtggatccgggcgatcgtgatgtttcgctggaaaaagtctgtgatgagatgcgtgaagatttgaaagcctatccggaattcagtaaagcacaggtaattctcggtggtagtaacacgggtatgtccgcacaggcaagtgccgactttgaggtttacggatacgacatgacaatgaccgatagtgtagcagctcgtctgaaacgtgaattgctgaaagtaaaaggtgtgaccgaggtaaatatcagccgtagtgactaccagccggaatatcaggtagacttcgaccgtgaaaaattggcgatgcatggcttgaatctttcaacagccggtaactatctgcgtaatcgtgtcaatggtgcggtagcatctaaatatcgtgaagacggagatgagtatgatattaaagtgcgttatgcgcccgaattccgtacaagtctggaaagtctcgaaaatattctcatttacaatgcgcaaggacaatccgttcgtgtgaaagacgtcggaaaggtagtcgaacgtttcgcgcctcctactattgaacgtaaagaccgtgaacgtatcgtgaccgtttccgcagtaatctccggtgctccgttgggcgacgtagtagctgccggtaataaggtgatagataaaatggatcttccgggagatgtcaccattcagatttccggttcatacgaagaccagcaggattcgttccgtgatttgggaacacttgccatcctgattgttgtgctcgtatttatcgtgatggcagcgcagttcgagtcactgacttatccgttcattatcatgttttccttgccgtttgcatttagtggtgtcttgatggcattgttctttacgggtagcacattgagtgtcatgagtttgttgggaggtatcatgttgattggtattgtggtgaagaacggtatcgtgcttattgactacatcaccctttgccgcgaacgcggattggcagtgttaaactctgtagtaacagccggtaagagtcgtctccgcccggtattgatgaccactgctactaccgttctcggtatgattccgatggctatcggtggcggtcagggttctgaaatgtggagcccgatggcgattgccgtaatcggtggtctgacagtatctactgttttgacgttgattctgattcctacgctgtattgtgtattcgcaggaacaggtatcaagaatcgtcgtcgtaaactccgtcgtcaacgtgaattggatgtttacttccaggcgaataaagacagtattattaagaaataataaagaaagaatatgaaatcagtattgataacattcgatcaggcttattacgagcgaatcatggcgttactcgaccgtttgggatgccgtggttttacgtacctcgaaaaagtacagggacgtggttcaaagacaggcgatccgcatttcggaagccatgcctggccaagtatgtgttcggctatcctgacggtagtcgatgacagcaaagtcgatccgttgctcgacaccttgcataagatggacttggaaacggagcaattaggcttgcgggcatttgtgtggaacattgaacggacgatctgaccgatgtc

SEQ ID NO: 8330 - DNA, 6748 bp, Unknown
  gut microbiota DNA sequence
ttctccgcaagaacagtatgtcacagaggctttgatgaaagtcagagacggaatgaagataaagcctcttcctgattctcttcccaagagagaaaagtaaagtcctttgctaactgattgactaacaaatgaaatcaataaaggtgatgtacttaaaaccgattaattaacaaaagtaactttcttgctccctctcttgggagaaggctgtggaaaggctgcttttaaacctatatattatgttttctaagttttttatcaaccgaccgatatttgctactgtccttgccctgcttattgtagtagccggtctggtcacactcaatatattgcctgtggcgcaatttccggagatcacgccgccaacggtgcaggtctctgccgtttatcccggggcaaatgctgaaactgttgcccaaacagtgggtattcctatcgaacagcaggtgaatggtgtagatggtatgctttatatgtcttccaattcttcctcttcgggagcgtattctctgaccattacattcgctgtcggtacggacatcgatatggcaactgtgcaggtacaaaacagggtaagtatcgcgcaatcatcactgccggaaccggtagtagtgcaaggagtcactgtgcagaaacagtcttcaaacattgtgatgttcctgacaatgacttcgcaggattctgtatacaatagcttgtatctgactaattatgccaaactgaatttagtagaccagctgacacgtgtgcccggagtgggtgctgtgaatgttatgggagctggggactattcgatgcgcatctggctcgatccggaggctatgcgtatacgggatatttcaccgcaacaggtttatcagtctatccagtcgcagaatgtggaagtatctgccggatatatcggtcaacctatcgggcaggataataataatgcttttcagtatacattgaatgtccagggacgattgaaatctccagaacagttcggcgatattattatccgccgcgaacagaacggagcgatgcttcgcctgaaggatattgcacgcatcgacttgggttctgcgtcatatagcgtagtgtcacgattgaatggaaaacctacggctgccattgctatttatcagcaaccgggttccaattcgctggatgtatccaaaggagtgaaggctaaaatggaggaattggcggcaagtttcccgaaaggagtttcgtataatgtcactttggatacgaccgatgtgatccatgcttctattgatgaagtgatggtcacattctttgaaacgactttgctggtgattctcgttattttcctgttcttgcagaattggagggctgtgattattccttgtattaccatcccggtatcgttgattggtacatttgccgtgatggcggcatttggtttctctatcaatacactgacgttgttcgggctgattctggcagttgccattgtggtggatgacgcgatagtggtggtggagaatgcttcgaggttactggaaaccgggcagtactccccccgcgaagcggtaacgaaagcgatgggagagattacaggcccgattgtcggggtagtgcttgtattgctggctgtgtttattccaacgatgatgattagtggaatttcagggcagttgtataagcagtttgcattgaccattgccgcttctaccgtgttgagcggtttcaattcgttgacgttgactcctgcgctctgtgcgttgtttcttgaaaagagcaaaccttctaacttctttatatacaaaggtttcaataaagcatacgacaagacgcaaggagtgtatgacaagattgtcaaatggttgcttcagcgtcccggaatggctcttgtttcctacggtgccttgactgttattgctgtattgctctttatgcattggccgtctactttcattccggacgaggatgacggatattttattgctgttgttcaacttccgcctgcagccagccttgaacgtacgcaggcagtgggagataaggttaatgcaattctggattcttatccggaagtgaagaattatattggcatttccggcttctcgataatgggtggcggcgagcagagcaactcggcaacttattttgtggtactgaaaaactgggatgaaaggaaagggaaggagcatacggctgctgccgtagtcaaccgttttaatggtgaagcgtatatgactattcaggctgcagaagtatttgcgatggttcctccggctattccgggactgggtgcttccggcggtttgcaacttcagttggaagaccggcgtaatctgggaccgacggaaatgcaacaagctatcaatgcgttgcttgcttcttatcattctaagccggctttaggatctgtgtccagtcagtatcaggcaaatgttccgcagtatttcttgaatattgatcgtgataaagtgcagtttatggggattgccttgaatgatgtgttctctacattgggctattatatgggagcggcttatgtgaatgactttgttgaattcggccgtatctatcaagtgaagattgaggcacgggatcaggcacagcgcgtgattgatgatgtcttgaaactaagtgtgccgaatgcggcaggagagatggtacctttttcttctttcaccaaagtggaggaacagttaggacaggatcaaataaaccgttataatatgtactcgactgcttctctgacttgtaacgttgctccgggaagtagcaccgggcaggccatacaggaagtggaagcattatttaaggaacagctgggagatgagtttggatatgaatggacttctgtggcttatcaggaaacacaggcaggaaatacgactaccattgtacttgtgatggctctaattgttgctttcctggtacttgctgcacagtatgagagttggaccagcccggtggcagccgttatcggattgccggtcgcattattgggtgctatgattggctgtctgattatgggaactccggtcagtatttatacgcaaatcggtatcattctgcttgttgcgctttcggcaaagaacggtattttgattgtggaatttgcccgtgatttccgtgccgaaggtaattcgattcgggaagctgcttttgaagcgggacatgtccgcttgcgtccgatcctgatgacatcttttgcttttgtactaggagtgatgccgttgttgttcgctaccggcgcaggtgcgcaaagtcgtatagcattgggagccgctgttgtgttcggtatggctatgaatactttattggctactatttatattcctaatttttacgaattgatgcagaaattgcaagagcggttcagtaaaaagaaagcagatgatggtggcgggaaagatgctgcaacgcagaagtaaaaagctgtttgaagactgtctggaagggtagttggtatagtgacgctatctgttcgggatagcgtcaccatagtaggcaaatagcgtcactatcttgaggggatagtgacgctattttattcttgttggtaagtctgttttttaaggcgaatacagcggattattttataaaaaattgtaatcaggaatatcctggaggaacgtataactctgatgttcataatccatacggcagcaataatgttgcattccgttgctgacaatcaggtaatctactttcagtaccatattataccgggtgatctgatcgaaaacagcttgcgttatttcaatgtgtggtgctttatattctacaatcatccgggcagataaatccctccggtaaagtactgtatcgcatcgtttggtagtaccgttcaacttcaccattacttcattggcaagaagggtagtcggatatcctttgtgtgcaataagaaagtgaacaaagtgttgccgtacccattcttcaggggtaagggcgacatatcgtttacgaataacgtcgaaaattacattttttccgtttcgtacgtttattttagtgtcgaatactggtaggtttaacgataacatttattatttttgtaagttaaataatggttcccattattgggagcacaaatttaatagataattatgaaaacaaaagaagaaatcgtagctaattggctgccgcgttacacaaaacgtaacctggaggattttggagagtatattctgttgactaacttcaacaagtacgtcgagattttcgcaaatcagtttaatgttcctattttaggaagggacgcaaatatgatttctgcttctgccgaaggtatcacaatgattaacttcggtatgggaagtcccaacgctgctatcatcatggacttgctgggtgctattcgccccaaagcatgtttattcctcggaaaatgtggtggtatcgacaagaaaaaccagcttggtgacttgattcttcctattgcggctatccgtggggagggaacttccaatgattattttcctcccgaggttcctgcgttgcctgcatttatgttgcagcgtgccgtttcttcatccattcgtgacaaaggccgcgactattggaccggtactgtatataccactaaccgtcgtatttgggaacatgatgatgcgttcaaagaatatctgacaaagacacgggctatggcagtcgatatggaaactgcaactctgtttagttgtggctttgccaatcatattcctaccggtgcattattattggtatccgatcagccaatgactcccgatggagtgaaaacggataaaagcgataatttggtgaccagaaattatgtagaagagcatgttgaaattggcattgcttctctgcgtatgattattgatgaaaagaaaactgttaaacacttgaaattcgactggtaatccggtctttctgaaaaaatatatatggcaaaacaagaattgacctgtgatgacatcctcaaggaattgagagcaaagcagtatcgccctgtctattacctgatgggagaagagtcgtattatatcgacttgattgcagattacataacggataatgtgttgagtgaaacggaaaaagaattcaacctgactgttgtgtatggtgctgacgtggatgtggcaacgattataaatgctgcaaagcgttatcccatgatgtcagaacatcaagtagtagtagtgaaggaagcgcaggccgtgcgtaatatggaggagttgtcatattatcttcaaaagcctttgctttccactatcttagtgatatgccataagcatggaactttggatcgtagaaagaagttagctgccgaggtggaaaaaacaggtgtattgtttgagtctaaaaaaatcaaagatgcgcaacttcctggttttatcgcttcatatatgaaacgaaaaggggttgatatggaaccgaaggcaacttctatgcttgctgattttgtaggctcggatttaagtcgtctgaccggagaacttgaaaagttgattatcactttacctgccggacagaaacgtgttactcctgaacagatagaaaagaatatcggcataagtaaagactataataactttgaattgcgcagtgctttagtggaaaaggatatattgaaagcgaacaaaataataaaatattttgaggaaaatccgaaaactaatccgatccaaatgacgctgtctctattatttagcttttattccaacttgatgttgacttattatgcaccggataaatcagagcagggaattgcaaacatgctaggattaagaactccatggcaggctcgggattatatggtggcaatgcgaaaatatagtggagtaaagacgatgcaaattgttggagaaatacgatatgctgatgcaaaatctaaaggagtccaaaacagttctatgacagatggagatattcttcgcgagctggtgtttaaaattttgcattaactcgaattaagaattacatatatcatcagacatatacttttaccatagatagaaatggggagtatatgtcttttttatattcccgcaattatacttatctcaaaaagactcctcactattttctgtgattatttttacaaataaatttagttatttcatcgttttatagagttactgtttggctaatcacacaaacagttttttttaattttatattgccctatcttttcagaaaatacattttcattaaatctaaagcttgaattttttaacgagaaaagtttactgatccttgagttttatcaaaaaagcattttagattttgatgctaccattttatagtgagaatggagattttctctttttctaaagttgcccattaatgtcattttgatagttcagactatatttgattgttgcaacatgacttttttctagtttaatagaaatatagattcactttattggacttaatttcttgtatatcatttatttatgcgaaaaataagccttctagaatcgaaaaaaaataaatatctggagattggtacagaaatatcgcaaggatttgctttttagagaaaattgtaaaggatgattagataaaaatagcagtatacattggtaaagcatgagttgattccttctttttattgcttttgcaactatcaatatttacttttgtatatttgatctgttaccaatgtataaagtattgatgtgaataagatacaaatgtgataaagagtaggtattcacaatgatatatttatgaaatcacaatactaatattacatatacaaatgtggttatattgctattaacaaataattttatactgtttatttacgtgt

SEQ ID NO: 8331 - DNA, 981 bp, Unknown
  gut microbiota DNA sequence
aaaggctaacggggcaatctggataatgttcaattccatgtattcctttaacttggcggcaggtatcatatcctgcaaggcgtcatataaaggttgtaggtatggatcgatcttatctttcatgtcgccgggcaggaaaccgagtttttctccggcttctacggcggggcggctaagaatgatttttttgatttctttgttttttaatgcacgcacggcaagggcgatagcagtgtatgtttttcccgaacctgccggaccgatggcgaataccatatcattcttggcgaatccttctaccagtttcaactggttttcgcttcgggggatgataggcttgcccgtgacgctgaacacaatcacgtttcctgtctgttccgcttgcggagcatttccttttataatgtcaatgatgacctcttctttcagtgaattatattcggcgcagtacttttcaagtttggtgatattttcctcgaaggcacacatttcttcctcgtcgcccagcactttgatgacattgcctcgggcaactatgcgtagctttgggtataaagctttaattaactgtatgttggcgttgtttacaccgtaaaaaataaccggatcaatgtcctcaagaacaatcagcttctctatcattaagttgtattaaagaaaaatttctgcaaatttaatcaaacgttttggattctctgattgtttggaggtgaattttactgcaaatcttctactatccacttttcgatgtttcttgtttcattactgaaattaatgcctattttaaatatttgtcgcttgtcggcagcaaatgcttgtgcataatgtttgtcattgatttgttgcagagcttcttcggcggttccctctagcttgaattccattacatagatgaaatgatcggtttgcaggacgaggtcaatgcgtccttgtgaggtatgatactctgcttttacatagaatccaatgagtttaaatacg

SEQ ID NO: 8332 - DNA, 1484 bp, Unknown
  gut microbiota DNA sequence
atacaagtaacgacctgaaagctcgtctgattgtaaagattgaatcttttaatccggctggaagcgtgaaggaccgcatagcattggctatgattgaggatgctgaaacgaaaggtattttgcattccggagcaactattattgaaccgaccagcggaaataccggcgtgggattggcttttgtttcggcagctaaaggctataaactgattctgacgatgcctgataccatgagtatcgaacggcgtaatcttctgaaagctttgggtgcggaattagtgttgacccctggtgccgatggtatgaaaggagctattgccaaggctgaagaactgaaggctgtcactccgggagctgtcatcttgcaacaatttgagaatcctgctaaccccgccatgcatttacgaactactggtctggaaatatggagagataccgaggggaaagtcgatatctttgtagccggagtaggtactggcgggacagttagtggtgtaggggaagcgctgacgatgcgtgatccgagtataaagatcgtggcagtagaaccttctgattctccggtactatcgggaggtaaaccagggccgcataagattcagggaatcggtgcagggtttgttcctaaaacgtacaaggcttctattgtagatgagattattcaggtgcagaatgacgatgccattcgtacgagtcgtgaattagccaaacaggaaggtttgttggtaggcatatcttcaggcgcagccgtatatgctgctacggaactggcgaagcgaccggaaaatgcagggaaaatgattgttgcattattacccgatacaggtgaacgttatttatctaccattttgtatgcttttgaggaatatcctttgtaataataccgctttccttcagataaaaacaaccgctcctttgggctcaaacgattgtctttttgttgtagacatacggtcgtttggaccaagaggagcggttgtttaaatttggttgaacagtctcaaacggctgttcaaccggttagatgataatttgagttcaccacaaagtaacgcagtgtctcatagagttattgtcgggagtgtatacattaataatgcacatttacttataaatacctacttataaatgcctacttataggtaatagtcaatacttgatttccgcattgcatacggaaatccccttgttccagtacccattgcccatcggaattgacaaaagccaagtcactgcctttgatggatagagtgacagtttgggtttcgcccggttgcagttccacctttttgaaggctcgtaaccggcggttttcgggagtaagcgaagccacaagatcactgctgaatagcatgacaacttcttttccggtatatttaccggtattggttacatctatggaaaagtgcaaatcatctcctgtggtaaacgaagatttgtccgtttggaagttgctgtattcgaaagtggtgtagctcaatccg

SEQ ID NO: 8333 - DNA, 8076 bp, Unknown
  gut microbiota DNA sequence
caccttcctatttctgccttgatggtattacactcatcgaagactaaataaccaacttgtttgattgattgagattaacatcaatcgaccgcataattttaaagagccggatattcttttaagaaatctggctctctttctattgactcactacattttgatatattaccagcccatagagaagtaaatccaacaactctcactaacaaaaagacactatatatttgttaatcacacaaattttatctacattcgtcgttcaaaactattaaatctacgacaatggaattaccttttgctgaatcatggaaaataaagatggtagaacccatccgaaaaagcacacgtgaagaacgcgagcaatggattaaagaagcacattataatgtctttcaactcaaatcagaacaagtttatatcgatctcatcaccgattccggaaccggagcgatgagcgaccgtcaatgggcgggaataatgctaggcgatgaaagttacgccggagcaacctctttctttaagttgaaagagatgattacgaaactgacaggatttgaatatatcatacctacccatcaaggacgtgccgcagaaaatgtgcttttctcttatctcgtgcatgaaggagacattgtacccggcaactcacattttgacaccaccaaaggacacatcgaaggacgccatgccaccgcattagactgcactatcgatgcagcaaaacatacccaactggaaatcccgttcaaaggaaatgtagaccctgataaattgcagaaagccctgacagaatatgcagaacgaattccttttatcatcgtaaccatcaccaacaatacagccggaggacaacccgtatccatgcaaaacctgcatgaagtacgtgccattgctgacaaatacggcaaacccgtacttttcgactctgcacgctttgctgaaaacgcctatttcatcaagatgcgcgaagaaggttaccaagacaaaaccatcaaagaaatcacacgggaaatgttctctctagccgatggcatgacaatgagtgccaagaaagacggaatcgtcaatatgggtggatttatcgccacacgacgttcagactggtatgaaggcgcaaaaggtttctgcgtacaatacgaaggctatctcacctatggaggaatgaacggacgggacatgaacgctcttaccatcggcttggatgaaaacaccgaattcgacaatctcgaaacacgtatcaagcaagtggaatacctggcaaagaaactggatgaatacggaattccttaccaacgaccggccggaggccacgccatcttcattgatgcacctaaagtactgacgcacgttcccaaagaagaattcccggcacagacgctgaccatagaactttatttggaagccggtatccgtggatgcgagatcggttatatcctcgccgaccgtgatccgataactcatgaaaatcgttttaacggtcttgatttactccgcctcgccattccccgcagagtatatacagacaatcatatgaatgtaatagccgctgctctcaaaaatgtatatgaacgtagagaaagcatcactcacggagtgcgtatcgcctgggaagcgcctttaatgagacatttcacagttcaattggaaagattataaacttagaaaaaataacaaatatcagttgaagaagtaatagaaagggattgaaaagaccagtgccagtatgaacgggcaatactttctccattaacaagaataattgtttgcataaaacaaaagtgtttcccaagtgtttatattataatcgaacttaatacgtaaaattatggcagaagattataaattaatagacaacgaagaaaaacatcgatatgaatttcagatcgatggcaaaatagccgaaatagactatatcaaatcaaataatggagaaatataccttgtacatacagaagtacccgcctcattaggcggcaagggagtaggatcacaacttgcagaaaaagcactgacagacattgaacgacaaggtttacgcctggtaccgctttgcccgtttgtagccggatatattcacaaacatccggaatggaagcgcattgtaatgcgtggtattcatattaaataaatacagatatggaaaagaaaatagaatacaccaatggtgaactgaccattatatggaaaccggaattatgccagcatgccggaatatgtgtaaagatgctacccaatgtctatcatcctaaagaaagaccctgggtgcaaatagaaaatgcgacaacggaagaattaattgcacaaatcagtaaatgtccgtcaggagcattgagctaccgacttaacaaaaaagagaagtaaaccaaccataaaagaacctgtctgaaaagccgtgagttcataaaatcatgagggcgtccgaatataaagtgaaccccgaaagtcatacaaaaactttcggggtttatttattatgtcaagacatcacacattacaaagaaaagagaaacaggtagaggcacttcatttcctcccccattcaactcaatgtccatgtcagtacaaagtccgggcagatacgataaccgacagagtaaagttcctgctgctccgtcgccaactcctgaacctgaaacgttccttgctcttgaggaataaaatgcgtcaaacggagtttacgaaggtcagcgtcagcgttttccatccgtttaaaaacagcttcttttgccgaccaatgcaataacagtccccaagtcatatctccctgataaggttccgtttgttcgtcagaacggatatacctatcggataccttgtgaacgcgttgagcatattgctcaatatcaatgcctgcctgagtgaaagaagcaagcatcacagctacataacctttcgtatgagaaatactgatgaaaaaagaatgatccgtcagatacggttttccttcgggagaataaccgatttccttatcctcctgcaacatagcatacaacaaaacacgaacggacaaccattccatcttacggcgttcggagacaaaacgattcaattcctgttcacagaacactcttcgcgcatccggcaaaagagccaacagagcatccaaagactcttccatcttccagacagcccactgtatatcatccgtcttatgttgcagaaataacgccatcttacgtttgcttgattatgctttcaaaattatgattccaagattattccttctctaccgagccttccatatccttcggcagaattgtaaacttcactttcaggatacgacgactatccatttcgagcacttcaaattcataatggtgataagtcactttctcatgcaatgccgggaattcacctttaatttcgagcaacatacccgccaatgtatccgcatctcccaccaccttttcaaactcgtcttcgtctactttcgcaatcttatagaaatccgtcaactgcgtcttcgcttcaaatatccaggtatggtcattcaagacaacgtatgtacgttcttcatcatcatattcatcgtgaatctcacctacaatctcttcgataatatcctccatcgtcaccagtccggaagttcctccaaactcatccacaacaatggcaatatgaatcttattcgcctggaagtcacgcaacagatcatcaatcatctttgtttccggcacaaaataagccggacggatcaatgactgccaacggaaattatcccccttgttgacatgaggcagcaagtctttaatatacaatacccccttgatattatcccgcgaaccggaatagataggaatacgcgaataagcattttcaatgatacattgcatcacctccttgaaagaggtacggatatccagatcgaccatatccagacgtgatgtcatcacctccttcacagtttcaccgccgaaacggataataccctccaagatattattctcttcagagagttccgctttatctgtcagctccaatgcgtgcgacagttcgtcgacagaaatattatggctcttctttacaaaatgtttattcagaaaagtagttgaacgtacaagcacagtagccaccggacggaacagcttttccagaaagtaaatccccggtgccgaaaaacggcaaaaagccaaagtcttctgtgccgaatagattttgggcatgatttcgccgaacaacaacaatagaaaagtcaggatgacggtcagtatcaagaactctgccaatggagaatgaaaaacaaatacattcataaagaagaagttgcagagcatgataatggttacattcacaaagttgttcgtaatcaatatcgttgccaggaggcgttctgaatcccccaacagggcacttattttttcatcggaaggatgattctgttcatcaatatcattccgatcggaaggagtaagtgagaaaaaagctatttcggaagccgaagcaaagccggaagcaagcaggagtacacctgccaatactatggcaataatagcagagatagaaggagtgtttacggtaataccgttgaaaatgtcagccaattggcttaaataaccatctgagtccaaagagtctatattttaattaaacaaaagataatgtgccaagaagctcgcgaaaacctattggcacactatcacattatctagaacggcaaatcatctgccggattatcttgtgcgggttgtgcctgcgactgctgcgcttgttgcggctggccggcaaccgattgttgctgttgccccgtagtcggttgtccggaagcagaagctcctgcacccggattagctcctttcggagacagcatttccatattatccacataaatttcggtgatataacgcatagcacccgactggtcgctataagaacgtgttcttatctttccttccagatacagtttgtcacctttgtgcacatacttatccacaatctccgccaaacggttggatgcaacgatattatgccactctgttctttcgggaatctgggttccattagccaacgtatatccacgatccgttgtagccaacgggaaagttgctactgccgaacctgtatcgaagtattttacccgaggatcttgtcctacgtttcctatcaatatcactctatttactgacatatctgtatcaagtttatgattcttaaaattaaatctgctgccaaaattaaacagaataacaataggatgcaagattttaagtataaaatcaagtattaagttttaagtattaagtattaggctgcgccataaactgcatgggtaatactcaatacttattacttaatacttattctaatgcttattctaatgcttgtagcaagtcttgtactaatttagaaacagcgtattgctccagttcgtccacccttattttcaggaaatcactgaaagaagtcaaattttcagacaaggtcacttcatatagattagcatagataacccggtgagacaatacatgcttcacctccctgcaaaccgaacgtaccaccggtacttcccccggcgcaaagagtgcacgaaattccggtaaagtcaaaaaatcttcttccgaaagagccgtcggagtttctatcaagggcagttcgaacagatttttccaaatatcattgcccgtccgtttatttataaaggtatacgcgcccgcacgtacataaatataattaaagtaacggttcgttgtctttgttttgtgttgcttcaccggaagttttgccaccaagcctttcgaaagtgccgagcaactgcccaccaacggacagaacaaacaatcaggcgactgcggagtgcactgaatcgccccgaaatccattattccctgattgtaaacagccggatgcttcttatccagcatctcatccgccaatgctgcaaagagcttttttccttctgtcgaatcaatcggagtatcgatgccgaaataacgggaaagcacccggtacacattaccgtccactaccgcataaggcataccgtaagcaaacgaacagatcgctgccgctgtatactcccccactcctttcagagccagcacttccggatacgtttccgggaaaaccccattcatgcttttggcggcggcatgaagattgcgggcacgtgagtaatatcccagtccttgccagtatttcatcacttcatcctcctccgcagcggctaaagtccgcacatcgggaaaacgtttgataaaacgaagaaaataatcatacccctgcgccacccgcgtctgttgaagaatgatctccgaaatccagatcagatacggatcggcagactccctccagggcagttcacgtttattctctttataccactctacaatcgttttagtaaactcgttcatatcctcgttcctagtgtattatctaacatttatcttgcctatcctatccaaaaggcacacaaaagtaactcttttggttctaagaaaaccctatgccactatttttttagaaaaatgtgcagaatatatttttttaggagcttaaaaagctatatatttgcagtccaaaaaattagcaataacatagtaataatattttttttaaggaaaaatgactaaagcagatattgtaaacgagattacaaagaaaactggaattgataagcagacagttcttacaacagttgaggcatttatggatgcagtaaaggattcattgtctaacgatgagaacgtatacttgcgtgggtttggtagtttcgtagtaaagaaaagagcacaaaagactgctcgtaacatttctaaaaatactacgatcattattccggagcacaacattccggctttcaaaccggctaagacatttacaatttcagtaaagaaataataaacaagagtattaacccataaaatgtgaagctatgccaagcggaaaaaagaaaaaaagacataaaatgtctacgcacaagcgtaaaaaaagactaagaaagaacagacataaaagcaaaaaataatttttaagtctggatcacacagaaataaagaacaaacttgcgaagctaatgtctttcaagtttgttctttgtttaagtagctaacccaaaatgaacaatttgtcaaaaaagttgttcatataaatgagattcaatcaataataaggaaacaaaacagtgacaagtgaactagtagttgacgtacagcccaaagaggtctccatcgcccttctcgaagataagagcctggtggaacttcaaagcgaaggaagaaatatttctttctctgtgggcaatatgtatttgggacgtatcaagaaattgatgcccggactgaatgcatgctttgtagacgttggttacgagaaagacgctttccttcattatctggacttgggtcctcaatttaactcactcgaaaagtttgtaaagcagactttaagcgacaaaaagaagctgacctccatcagcaaagcaaccctgcttcccgatcttgacaaggatggaacagtatccaacaccctcaaggtaggacaagaagtagtggtgcaaatcgttaaggaaccgatctccactaagggaccgcgactgacgtccgaaatttcgtttgccggacgctatctcgtactgatcccttttaatgacaaggtttctgtttcacaaaaaattaaatcgagcgaagaacgcgcccgcctgaaacaattgctgatgagcatcaagccgaaaaacttcggtgtcatcgtccgcacggtagccgaaggcaaacgcgtagccgaactcgacggagagcttaaagtcctggttaagcattgggaagatgcgatggtaaaagtacaaaaagccaccaagtatccgacgttgatttatgaagaaaccagccgcgccgtaggtttgttgcgcgacctcttcaacccttcttttgagaatattcacgtcaacgacgaggctgtgtacaatgaaattaaagactatgtatcactgattgcgcccgaccgggctaatatcgtgaaactgtacaaaggtcaacttcccatttacgacaatttcggtatcaccaagcagattaaatcatcgtttggtaaaacaatctcttacaagagtggtgcctatctgattattgagcacactgaggcgct

SEQ ID NO: 8334 - DNA, 407 bp, Unknown
  gut microbiota DNA sequence
gaaggcttttcggcagatgtgactatgatatttttagtctgcgaatcaatgcttacaatagtacttgcaaataaatcgcttccgatgataccatctactccaaaacattcccagccttttacttcattgatgattagcgacggggcatttttaaagttaataacatcatcgggagtcgtcagattttctattcgcgtagttttgtaatagctttccacgttattcacatctgtcaccttcatagagtctgttgctgttatttgtagtgcttgacaggctttagtggtaagtgcggtgcgccctccggtatcaaagataaaagggcgtgcattgccgttcactttcatttcgataaccattttttcgcctactatccgataaggtatagttgctttatattgttgggc

SEQ ID NO: 8335 - DNA, 9503 bp, Unknown
  gut microbiota DNA sequence
cctgctaaaaaagaaacgataaaaccggtcaaatcagaacaagtatcccaaccggcttctaaaaaaacagctccagtaaaggaaaaatctcctgtaccttatttaatagccgttattgtaatcgttttgttattatgtggaggtgttatcctgtttatttattacccggatttattttcttcttcatctgacaagaatgcgctggatatgccacctgtgacaactcaacccgttcaaccggaaacacaactttccgatacaattgaacagaaggataccataaaggaaataactcctgatgtacctaaagttgttacgcccacaccacctgttgctcaaaaagaagaaactgttcctgccaaagcagaaccccagacagctccacagcaacccgctacatctgcttatttggattcagcatcttataaaattacaggaaccaaaacaaaatatacaatcaaagaaggagaaactttgactagggtttccttgcgtttttatggtacaaaagcaatgtggccatacattgtgaagcacaatccgaaggttattaagaaccccaataacgtaccatatggcacaacaattgaaataccggaacttacaaaagaataaatagcaataatccattcacccgatcatgcaaatcctgtattgatcgggtgaaatgttatggatgtacaaaagcgtatgaaagtaccttaatctaaagatttcgcattgttttttaataaaaattagttgcaatcgttaattatatggcgtacttttggaggcaaaataagaagccttacaacacacaggaaaggcttacataaaataaaagggatttaaataataaaatattaagtatttatggctgaatcaattgatatccgcgagctaaatgagcggattgaaagacaaagtgctttcgttaccaatcttacgacagggatggaccaaatcattgttggtcagaaacatttggttgaatcactgcttatcggattactttccgatggtcacgttcttttggaaggtgtgcctggtttggcgaaaactttggctattaaaacactcgcttctctgattgatgcgaagtatagccgtatccagtttacgccggatttattgcctgccgacgttattggtacaatggtttacagtcagaaagatgaatcttttaaagtgcagcgaggaccaattttcgcaaactttgtattagctgatgaaatcaaccgtgctcctgccaaagtacagagtgctttgctggaagcaatgcaggaacgtcaggttactattggtaaagaaacattcatattaccggaacctttccttgtactggctactcagaaccctatcgaacaagaaggtacttacccgcttcctgaagcacaagttgaccgtttcatgctgaaagttgtcattgattatccgaagctggaagaagaaaagctgattattcgccaaaatatcaatggtgagaagttcaatgtgaagcctattctcaaagcggatgaaattattgaagcacgtaaagttgttcgtcaagtgtatctggatgagaagattgaacgttatattgtagatattgtatttgcaacccgtttccctgaaaagtatgatctcaaggaactgaaagatatgatcggattcggaggttcacctcgtgcatctatcaatctggctttggctgctcgtacgtatgcatttatcaaacgtcgcggttacgtaattccggaagatgtacgtgctgtagcacatgatgttctccgtcatcgtattggattgacatacgaagctgaagctaataatatgacttcggacgaaatcatcagtaagattctgaataaggttgaagtgccctaatttgtagttataatacagtcaataagtagtcattaatatctatacatgactacttaactacttactacttaactactgtataaatggaaacaagtgaaatactaaaaaaagttcgccaaattgaaataaagacacgaggattgtctaacaatatctttgcaggccaatatcattcggctttcaaaggtaggggtatgttattttcggaagtccgtgagtatcagttcggcgatgatatacgtgacatagactggaatgtgactgcgcgcttcaataaaccttatgtgaaagtgtttgaagaagaacgtgaactgacagttatgttaatggtcgatgtttccggaagtttggaatttggtacgatcaagcagttgaagaaagatatggtgacggaaatcgctgccacgcttgctttctctgctattcagaacaatgataaaattggtgtgattttcttttcagaccggatagaaaagtttattcctcccaagaaaggacgtaaacatatcttatatattatccgcgaattgattgattttcagccggaaagccgtcgtacaaatattcgtcttgccttagaatatttgacaaacgtgatgaaaagacgttgcaccgcatttatcttatcagactttattgatcaggacagctttaagaatgcactgaccattgctaacagaaaacatgatgtagtagcattacaagtgtacgacaggagggttagtgatcttcccccagtaggactgatgcgaatcaaagatgcggaaactggacatgaacaatggatcgacacctcttccaaagctgtacgccgggcacatcgtgactggtggatacaaaagcagactgaacttaacgatactttcactaaaagtaacgtggatgctgtatctgtcagaaccgaccaggattacgtaaaggcattgttgaatttatttgccaaacgaaattaatggaatcaaagatgaatagaaatattattctgatagcattattagctctattgtctgtaggcaaagcagcagcacagtctgtcacggtagaagcaaaaattgattcattgcagatactgattggcgaacaggcgaaagtgcaattgcaagtagccatggatgctaaacagcgtgctatttttcctgcttacaccgatacattggtaagaggtgtggaaattatagaaactgtcaaaccggatactcaattcctgaatgatcgccaacgaatgttgattactcaagaatacattatcacttcttttgactctgctctatattatctaccaccaatgccggttaccgtagatgataaagtatataaatccaaagctctggcattgaaagtatattcgatgccggttgatacattacatccggaccagttctttggacagaaacctgtgatgaaagctccttttgcgtgggaagactggtatggattgattgcttgttcattcctggctttacctttgcttggtttactgatctatctcattattcgtatacgtgataataaacctattatccgtaaaataaaagttgaacctaaattgccgccacatcaggctgcaatgaaagagatagaacgtatcaaaacagagaagatatggcaaaaaggacaatcgaaggagtattataccgaactaacggatacacttcgcacctatattaagaaccgtttcggatttaacgcattagaaatgacttcttctgaaataattgaccagctattggagttgaatgataaagaggctatatcagacttgaagcttttgttccagaccgctgatttagttaagtttgccaaacatgatcctcagatgaatgaaaacgatgctaatttaattaatgccatcgattttatcaatgagacaaaacaaccggaagaggaaaaccagaaaccgcaaccaacggaaatcactatcattgagaaacgttctttacgtgttaaagctatgctgatttgcggaattgcactgttatcagcagcactgattggtacctttatatatataggtctgcagttatacaatctttttgtataaagagtgtataacttaatactaaatagtaaactgttaaatcataaataaaatggtttttgccaatattgaatatctgtttttgctattattgcttataccatatattgtatggtatatcctgaaacaaaagaaaagtgaagcaacccttcaaatttcagatgctcgggtatatgcacatacacctaaaagttataagaactatttgttgcatgttccatttctactgcgctgcattgctttggtgttagttatcttggttcttgcacgcccgcaaactactaacaagtggcagaacagtgaaatagaaggaattgatattatgctggctattgacgtttctaccagtatgctggctgaagacttaaagccaaacagacttgaagctgccaaagatgtagctgctgaatttatcaacggacgccccaatgataatatcggtattacattatttgcaggagaaactttcactcaatgtccgttgactgtagatcatgccgtattgttggatatgatacataatattaaatgcggccttatcactgacggtactgcggttggtatgggtattgctaatgctgtgactcgcttaaaagatagcaaagcgaaatctaaagttattatcttattgacggatggtactaataataagggagatatttctccaatgacagcagcagaaatagctaaaagttttggtattcgtgtatatactatcggggtaggtactaatggaatggccccttatccttatccggtggggaatactgtacaatatgtaagtatgccggtggaaattgatgaaaagacattgacagagattgccggaacaacggatggtaactatttccgggctacgagcaactcgaaactaaaagaagtatatgaagaaattgataaactggaaaagacgaaactgaacgtaaaagagtacagtaaacgagacgaagagtatcactggtttgccctagctgctttcctctgtgttttgttggaagtactattacgcaattcggtactcaaaaaaattccataagaatgtttgtcaatcgttatttgtcaatcataaaatagtaagaagatgtttcgatttggagaacctacatatttatacttattgctgctattaccttttttagcagctttctacttgtattccaactacaagagaagaaagaatatccgacgcttcggggacccgactttattggctcaattaatgcctgatgtatccaaatatcgtccggatgtaaaattctggattatttttgttgctattggcttgttctccgtattattagcacgcccccaattcggttctaagctggaaacggttaagcgtaaaggagtagaggtaattatagctttggatatttcaaactctatgttagctcaagatgtacaacctagccgtctggaaaaagcaaaaagactaatttccagattagtggatgaacttgacaatgataaggtaggtatgattgtatttgcaggtgacgcttttactcagctaccaattacaagtgactatatttccgctaagatgtttttagagtccatcaatccttcgttgatttctaaacagggtacagctatcggggaagcaatcaatttagcagctcgtagtttcactccacaagaaggggtaggacgtgctattattgttattactgacggtgaaaatcatgagggtggtgcagtggaagccgcaaaagccgctgcagaaaaaggtattcaagtaagtgtattgggagtaggtatgcctgatggtgcccccattccggtagaaggtacgaatgattatcgtcgcgaccgggaaggtaatgtgattgttacccgtttgaatgaagctatgtgccaggaaattgctaaggaaggaaaaggtatatatgtacgagtagacaactctaattcagcccaaagagctattaatcaagaagtgaacaaaatggcgaagtctgatgtagagtcgaaagtatatacagagtttaacgaacaattccaagctattgcatgggttattctactattgttattggcagaaatcttaattttggaccgcaaaaatcctttatttaagaacattcacctgttttctaataagaaatagttatacgtatgttaaaaagtaaatatattctattcgctgtatttctgctagcgacagtcggtgtctcggctcagaaagcagaacgcgactatatccgtaagggaaaccgcctgtttaatgatagtgtatttgttgacgcagaggtaaactaccggaaagctctggaagcaaatcccaagtctacagtatctatgtacaatttgggaaatactctttcgcaacagcaaaagtttcaggatgccatggaacaatacgtatcggccagcaaaattgaaaaggataaaatgaagctcgcccatatctaccacaatatgggagtacttttccaagctggtaaagattatgcaaaggctgtggacgcctataaaatgtcactgcgtaataatcctgccgatcatgaaacccggtacaatttggctcttgcacagaaaatgttgaaagatcaacaaaatcagcagaatcaagaccaaaatcaggatcagaataaagatcaacaaaagcaagatcaaaaacaagatcagaataaagacaagcagaaagatcagaaacaagatgaaaagaaagatcagcagcaaccaccgaagtcagaaaaaaaacaagataaccagatgtcaaaggagaatgctgaacaattgctgaattctgtaatgcaggatgaaaaagatgtgcaagacaaagtgaaaaagcaacaaaaagttatgcaaggtggtcgcttagaaaaagattggtaatataaagttgatgatataaatttcataagcaatgaaaaaactgattattatattgatggcattgatagcatatagcactcagatgcttgctgataaagtggcttttactgcttctgctcctgacgcagtggtagtaggcgaccagttcaggctgtcgtatactgttactacacaaaaagtgaaagatttccgggcaccatcaatcaaaggttttgatgtgttgatggggccaagccgttcacaacaaagtaatactcaaatagtaaatggtaatgttacgtctactagtagtattacattcacatatatattaatggcgaataatgccggagaatatacaatacctggagcttcaattgttgctgatggcgatcaaatggtatcaaattcagtaaggattaaagtattgccacaagatcaaggtgatagcaatagtagcagtagctcttctacacattcctcatctggtacaggggtctctaaccaagacttgtttattacagcaagtgccagtaaaacgaatgtgtacgaacaggaagcatttgtcctgacctataaaatatacaccagagaatccaatttacaactgaataatgcaaagttacccgactttaaaggcttccattctcaagaaatcgaaatgactacaaatgcgagatggactccggaacattatcagggacgtaattactatacgacagtttatcgtcagttcgttctcttcccgcaacaatcaggaaaactatatattgatcctgctcaattccagatgacagtcggtaagcctgtacaatctgatgatccttttgatgctttcttcaatggaggaagtaatgtcattgaaataaaaaaatcaatttccacccctaaaatagcaataaatgtaaatccgcttcctgcaggtaaaccggcagatttctccggtggagtgggagagttcaatatttcttcatctatcaacaacaaggaactgaaaaccaatgatgctattactattaaattagtaatatccggtacaggtaacctgaaattaatttctaatccggaaattaaattcccagatgattttgaagtatacgatcccaaagtagacaatcaagtcagattaacccgggaaggacttacaggtaataaggttatcgaatatttagcaattccgagacatgctggaacatataagattccaggagtatcttttagttattttgatattcgctccaaatcttataaaacgctgaaaacagaagaatatgtaataaacgttgagaaaggtgcgggtaatgcagatcaagtaattgctaatttcactaataaagaggatttgaaagtattaggtgaggacatccgttacatcaaacaaaacgaagttactctccagcctaaaggaagtttcttctatggttcaatgacatattggctattctatatcattccggctcttgcctttattattttctttattatttatcgtaagcaagctgctgaaaatgcgaacgtagctaaaatgcgtacgaagaaagccaataaagtagcaacaaaacgtatgaagttagctggaaaattactctcagaaaataagaaagatgctttctatgatgaagttttaaaggcactgtggggatatataagtgacaaactgaatattccggtatctcgtttatctaaagataatattgaagagaagctaagaaatcatggagtaaatgaggaactaatcaaagaattcctgaatgcattgaatgactgtgaatttgcccggtttgctccaggtgatgaaaatcaagccatggataaagtttattcttcttcaatagaagtaataagcaaaatggagaattcgataaaacattaacccagaagagattgtgtcatgaaaaagatattattttttatattattatcaatgtcacttacttgttttgcacaagattcgttaaacattgattctaaacaaaccaatggagctgattctatccacgcttcacacaccacattttccagtaacacactggaagatgccacaaaagctgaaggcgattccgcatatataaaagaagattatgcagcagctattcaaatatatgaagcattattaaaaaatggagaagctgctgacgtttattacaatctgggaaatagttattataaaataggagagatagcgaaagctgttttaaattatgagcgtgccttgttattgcaacctggaaatggcgatatacgtgctaatcttgaagtggcacgcgcaaagacaatagacaaagttgagcctgttcctgaagtgttctttgtttcatggatcaaatctctgacaaatagcatgagtgtagatgcatgggccacatggggtattgtatcctttattctattgattatagctctttacttttttatattctctaaacagattgtgttaaagaaagtaggcttcatattaggaattgtttttctgattgtcaccatttgctctaatctttttgcttcacaacaaaaagaacatttagtcaatcgaaatgaagctatagtaatgaacccaagtgtaacagttcgaagtactccaagcgagagtggtaccagtttgtttattctgcatgaagggagaaaagtaaacgtcaaggacaactctatgaaagaatggaaagaaattcggttggaagatggaaaagtaggatgggtaccagcttccgctattgaagtaatataaaggtcattaatagattttataaattcaagaaaaaaagataagcaaataatttgttttatcttttttttt

SEQ ID NO: 8336 - DNA, 1570 bp, Unknown
  gut microbiota DNA sequence
gtaaaattaaagattcattgcctagcggtagcatgcatagaatagcagacgaacttggtttgcacgtagatacagtgcgaaactttttcggaggacacaatttcaaggagggaaaaagtgtcggaatacatcttgagcccggtccagatggtgggcttgtaatgttggatgatacgaccgttcttgatcgggctttaaaaatcctagatgaattgaatatgagtatgcaaaaagaacaggctaccgaatctgtgcaagtttaaaatataacaaactgaatcccaattgaatcaaacaattgggatttcttatttgttttcaccttataaaatgtacatttatggaagacaaattagtaaccctagccattctgacatacactaaagcgcagatcttaaagaatgtcttggaaaatgaaggtatagaaacatacattcataacgtaaatcaaatacaaccggttgtttcttcgggggtgcgtttacgcataaaggaaagcgatctgccacgtgctttgaaaataacagaaagttctacatggctgtctgaaagtatagtgggagagaaggagcccaaaacagaaaataagtcaaataagattttaattcccgttgacttctctaattattcgatgaaagcgtgtgaatttgcatttaacctagcaaaaacagaaaatgctgaagtcattttgttgcacgtctattttacgcctatatatgcttcatcattaccatatggagatgttttcaattaccagattggagatgaagaatccgtaaaaacgattattcagaaagttcattctgacctcaatgccttatcagaaaagataaaagaaaaagtcacatcgggtgattttcccaatattaaatatagctgtatcttacgtgaaggtattccagaagaagaaatcttaagatatgctaaggaacagcgtcctatggttatcatcatggggactcggggaaagaatcagaaagatatcgatttgattggcagtgtaactgctgaagttattgatagaagccgcacagctgtactggccattcccgaaaacacaccatttaaacagtttagtgaagtaaaacggatcgcctttattaccaattttgatcaaagagatttaattgctttcgaagcattctttaatacttggaaatcattccatttttctgtatctttaatacatcttactgattccaaagatacctggaatgaaataaaactagcaggtataaaagaatattttcacaagcaatatccagggcttgaaattcattatgatgtagtaatgaacgataatttgctaaaagggcttgatcagtatatcaaagataatcaaatagatataatcactttgacttcttacaaaaggaatatatttgctcggttatttaatccaagtattgctagaaaaatgatttttcattctgatacgccattacttattattaatagctgatcagatcaagcaaaaaacgggcatttacgattatggaataatcaatattatgtttaattaaaaaggagcaatgttattatattgctcctttttaatttttatcaattg

SEQ ID NO: 8337 - DNA, 12871 bp, Unknown
  gut microbiota DNA sequence
cgaaaaaaagaaggttactatttctagcaaccttcccatatttttcagacttataattttcctgaaaacgatattacttcatcagtttatcgatttcttcaaattcaggtcccatgttcaagttatagtaaactctataaagaccttgtaaccataaatcttgttgatcaggtttcaaagctctagctttttcatagaatggtttagcttcttcgtagaatttcttaactacagcctgtgcttcagcatatttaggatcattgatatctgttgttgctttatcagcataatcctgtgctttcatcaaatataccaagcctacattagagtatgcttctgcatattccggatcagcagcaatagctttcttgtagtattcgattgcattatcatactctttcatattatgataaagatatgcttttacatacaaatacaacttattgttcggatcattagataacattctgtcagcaaactccatagcttttgaagcttgattagagctattataataatcaaccaaattagcaaagaaataatcatttccagggaactttaggataccctcttccaaagatttaatccaagcagcagtatcacctttagctttataggcatcagccatcaattgcattgcaaatttacctccgtccttatcagataaagccattggggcatatttaataatagcatctttatcacctaccctatcagcagccaatgtagcataatatgcaatttgtgggataagagtatcattcttagccaattctttatcagctagcatcggatacgaagctgattcaacatatgttgcaaagaatttcaaggcttctttattcttatccaagttaaaatactgaataccaccattaatcaaattaggacgttcagccaacatacttgaagcatttgctttccggtatttgtttttaacttttcccttttcattaggtatttccgctaattcatcacacttagtatagtactcatacattttcagaatactattatacactttcaatgtatcatacggttttttcaaaaaagcatttttcatttgctcttcgttgatacgtctctgaataaatccagcaacgtcccatgtgtcagcaagatccttcgtttcaggattcttcatagcttctttaataagctgctcagcctgcttaaaattaggttttacgtcattagccatactctttgcttctttcacatttttcatctgtgcgaatgagaagctaacagccatcaataaaaccatcgaaaataatactcttttcatgattgttgtttgattaattattaatattatgtctattcctcgatttcgttgttgctttcgttttcatttacgtctgctacatcatcaatatcaggagcatcagcattcggatcactcacaattgttccttctgcttcttctgccggaatttcatcttcaagactttctgtcataaccttacataccgaaccaatctggtcgttacgtttttctaaatttatcagacggacaccttgagtagcacggcccataatacgaacatcagccactttcaaacgaatagtgataccagacttattgataatcatcaagtcattttcatcagttactgacttgattgttaccaacttacctgttttttcggtaatattcatggtcttcacacccttaccaccacggttcgtcttacgatagtcttctatttcagaacgtttgccatatccttgttcggaaactaccatcacagattctgtcttcaaatctttgatacaaatcattcctactacttcatcctggccatcattatccaatgtaataccgcgtacacctgttgctgtacgtcccattacacgaactgctgcttcatggaaacgaattgcacgtccattacgattggcaatgatgatttcattgtttccattcgtcatacgaacttcaataacactgtcatcttcacggatagttatggcatttacaccattctgacgaggacgagaatactgttctagtaatgtcttctttattacccctttcttagtacagaacaatacataatggctattaataaactcagaatcttccaaactcttcacacgcaagtatgcagttacattatcgtccgagtcaatattcaacaaattctgaatagcacgtcccttagaattcttcgttccctcaggtatttcatatactttcagccaatagcacttgcctttttgtgtaaagaacatcatcgtattgtgcatggtagcaggataaatatgttctacaaagtcttcatcacgggtctccgtacctttcgaacctacaccaccacgattttgtgcacggaattcagtcaacggagtacgtttgatataacccatatgagaaattgtaataatcatctgatcatctgcatagaagtcttccggattgaactcttctgaagaataaacgatttcagaacgacgttcatctccatatttcgttttaacttccaacaattcatctttcattacctgacggcatacttcatcatcagccaaaatactttccaaataagctatctgcttcattatttcttcgtattccgcatgaagctgatcctgcatcagacctgtcaattgacgcaaacgcatttctacaattgcgcgagactgaatttctgtcaggttgaatcgctcaatcaagcctgctatagcgtcattaggagtttttgctgcacgaatgatacgaattacttcatcaatattatccgaagcgataatcaaaccttcaagaatgtgcgcgcgttctttcgctttacgaagatcgaactgagtacgacgaataacaacttcgtgtctatgttcgatgaaatatttaattaaatctctcagattcaacgtctttggacgtccatgaaccaaagcaacattatttacgccaaaagatgtctgcaaagctgtcattttatagagtttgttcaacactacacttgcatttgcatcacgtttgatgtcaataacaatacgcataccgtcacggtcagactcatcgttggcatttgagataccttctattttcttatcatttacaagatcagctatatacttaatcagttcggccttatttacattataaggaatctcggttattacgatcttatcatgtgtctgtccgctttcgatttcggctttcgcacgcataattacacgtccccgtccagtcaaatatgcctcgcgtacaccactcacaccatatataaacccgccagtagggaaatctggtgctttgacaaattccatcagttcttctactgtaatttccggattatcaatatatgcttcacatgcttcaattacttccgaaagattatgaggaggcatattggtagccatacctacagcgataccggatgctccgttcaccagaagattcgggatacgtgtcggcataactttaggttctaccagcgtattatcaaagttaggctcaaaatcgacggtttccttatacaggtcatccatcattgcttcacccaacttattaagacgagcttctgtataacgcatagcagcagggctatcaccgtctacagaaccaaagttcccctgtccatctaccaaaggataacgcattgcccattcctgagccatacgcaccattgcaaaataaacagaagaatctccatgaggatggtacttaccgagtacctcacccacaattctggctgatttcttataaggtttgtctgaagtattgcccaattccatcattccgtataaaattctacggtgaacaggcttaaatccatctctaacatccggaagggcacgtgaaacgatgaccgacatggagtagtcaatgtacgatgacttcatttcctcctcgatgttaatctttataattctgtcttgttcaagcatttaaaatgattattaattatacattctacggtttgtgaaaaaccacgctaaagtactacttttccccgatatacgaaagtttttagaaagaaagttttagcatgaccgggacgacaattcattaaactttaaaattcgaaaataaaaagataaaaacgataaatataatatggaaagatagataacattggtaaaaaagagctggatatttgttataccttatatatataatgcaaatacaccgtttttatggcacgccatttgtagatataagaaataaagcaaatattgcaatacaaacttgattaatgcgtatatttgccagtgaataacccttagaagaaaaggaaaagtatgaataatcaattctcacaaagagtttccgacattatcgtctatagtaaggaagaagcgaatcggttgagaagtaggtatataggccctgagcacctgcttctgggaatccttcgtgacggtgaaggaaaagctatcgagatattgtctaaactcaacaccaatctagctgcaataaagcaacagattgaagctcaactgaaggcagaagctgatgatatgttattgcctgatgcagaggtaccgttatctaatgatgcggcaaagatattaaaaatgtgtattttagaagctcgtggaatgaaaagtaacatcgctgatacagaacatgtattattggctattttaagagaaaaaaacaatatggccgcttccgtacttgaagcaaacgatataaattatgtgaaagtactggagcaagctacattgcaaccagatataaactctggcatgggctttacggaagacgatgatgatgacgaagaaatgtcctctccccgttccggcagaggtggttcggacgaacgccaacaagcacaaaccgcttctaagaagccgtctaatgacacaccggtacttgacaatttcggtactgacatgacaaaagcggcagaagaaggacgcctagatcccgttgtcggcagagagagagaaatcgaacgtttagcgcagatcttaagccgccgcaaaaagaataatccgattttgattggtgagcctggtgtaggaaaatcagcgattgttgaaggtcttgcattaagaatcattcagaaaaaggtttcgcggattctgtttgataaacgagtggttgctcttgatatgactgctgttgtagcaggaaccaaatatcgtggacaatttgaggaacgtattcgttccattctcaatgaattacagaaaaatccgaatgtaatattattcattgatgaaatccacacgattgtaggcgcaggttctgcggcaggttctatggatgctgccaatatgctaaaaccggcattggcaagaggagaaatacaatgtatcggtgctaccactcttgatgaatatcgtaagaacattgagaaagatggcgctttggaacgtcgtttccaaaaagtaatagtagaaccgactaccgctgccgaaactttgcagattttgcgtaatatcaaggataaatatgaagaccaccacaatgtgtattatacggatgaagcattggaagcatgtgtcaagctgacagaccgctatatcacagatcgtaatttccctgataaagctattgacgctttagacgaagccggttcacgtgtacatcttaccaatgtcaatgtgcccaaagagatagaagaacaagaaaaactgatcgaagaagccaaaagcaagaaaaacgaagctgtgaaatcgcagaatttcgaacttgcagccagcttccgtgataaagaaaaagagctttccgtccaattggatgagatgaaaaaagaatgggaagccaatctgaaagaaaacaggcaaactgttgatgcagaagaaattgccaatgtcatctcaatgatgtcaggcattccggtacaacggatggcacaggctgaaggtatcaagctcgcaggtatgaaagaagatttgcaggctaaagtcatcgcacaagatacagcaatagaaaaactggttaaagctattttgcgaagccgtgtagggctaaaagatcctaataagccaattggcacatttatgttcttaggcccgacaggagttggtaaaactcacttagcaaaagagttagccaaatatatgtttggttctgctgatgcactgattcgtatagatatgagtgaatatatggagaagttcactgtttcacgcttggttggagcacctccgggatacgtaggatatgaagaaggtggtcagctgacagaaaaagtgcgccgtaaaccatactcgattgtattgcttgatgagatagaaaaagcacatccagatgtgttcaacatcttgcttcaggttatggatgaggggcgtctgactgacagttatggcagaatggtagatttcaaaaatactgttattatcatgacttccaatataggaacccgtcagctgaaagaatttggacgtggcgttggttttgcgacacaaagccgcctggatgataaggaattctcgcgaagcgtaatacaaaaagctctaaacaaatcattcgcgcccgaattcatcaatcgtgtagatgagataatcacgtttgaccagctttctctggaagcaataacaaagattatagacatagagctaaaaggattgtatgatagaatagaatctattggttacaagcttgttattgaagataaggcgaaagaatttatcgccggcaaaggatatgacgtacaatatggcgcccgtcctttgaagcgagcaattcaaacttatctggaggatggcttatccgagctcatcatttcctcctctttgaaggagggagatactattcaggtatctctcaatgaagaaaaaggtgaattggagatgaaagttgtcactccggaataatattatttcctgaataagaaaataaaataatatgccataatgtcagaccttcgggtctggcattttttttgtctctatctgaacaaacatcaattaaaattaatcaatagataaactaaaaaatatacgtattatgcaaaaaggtaatattggggttacaacagagaacattttccctatcattaaaaagtttttgtacagtgaccatgagatttttctgcgcgagttagtatccaatgcagtagacgccactcaaaagctgaatacgcttgcttctattggcgaatttaagggtgaactgggtgatttaaccgttcacgttgaattgggcaaagataccattactatttctgaccgtggtatcggtttgactgcagaggaaattgaaaagtacatcaatcaaatagccttttcaggagctaacgacttcctggagaaatataagaatgacgcaaatgccattatcggacatttcggacttggcttctactctgcttttatggttgcaaagaaagtggaaattatcactaaatcatacagagacggtgcacaagccgtaaaatggacttgtgatggcagccctgaattcactattgaagaaattgaaaaagctgatcgtggatcagacatcatcttatacattgatgatgactgcaaagaattcctcgaagaagcacgtatttccgagcttctgaagaaatattgcagcttccttcctgttcccattgcatttgggaaaaagaaagaatggaaagacggcaaacaggtagaaacagccgaagataatataatcaatgataccactcctttgtggacacgtaaacctagcgaactttcggatgaagattacaaatcattctatagtaagttatatccaatgtctgatgaaccactattctggattcacctgaatgttgattatccattccatttgactggtatcctctatttcccgaaggtaaagagcaatattgaattaaataagaataagattcagttatattgcaaccaggtatatgttacggactcggttgaaggtattgtgccggacttcctgactttgttacatggcgtaatcgattctccggatattccgttgaacgtttcccgttcgtatttgcaaagcgactcgaacgtgaagaagatttcaacttatatcacaaagaaggtttccgaccgtttacagtctatattcaagaatgaccgcaagcaatttgaggaaaagtggaatgatttaaaaatatttatcaattacggaatgctcacacaagaggatttctatgataaagcgcaaaaattcgcccttttcaccgatacaaatgacaatcattacacatttgaagagtatcagacccttattaaagataatcagacagataaagatggaaacctaatctatctgtatgcaaataacaaggatgagcaatatagttatattgaagctgccaccaacaaaggatacaatgttctgctcatggatggtcagttggatgtagctatggtgagcatgctggaacaaaaacttgaaaaatcccgtttcactcgtgtagacagcgatgtcgttgacaatcttattgtaaaagaagataagaaaggtgaaacgttggaagccaataaacaggatgcaatcacaacagccttcaagagtcaattgcctaaaatggataaagttgaattcaatgtcatgacacaggcattaggagaaaattcagctccagtcatgattactcaaagcgaatatatgcgtcgtatgaaggaaatggcaaatattcaggccggaatgagtttctatggtgaaatgcctgatatgtttaatctaattcttaattcagaccataagttgataaaacaggtattgaatgaagaagaaagcgcttgccaggcagaagtagctccgatactttctgaaatggacaatgtcaacaaacaacgcaatgagttgaaagacaagcaaaaagataaaaaagaagaagaaatccccacatcagaaaaagatgaactaaacaatctggataagaagtgggatgatctgaaaagcaagaaagaagctatctttatcggctacgcaagcaataataaagttatccgccagctgatcgatttggccttattgcaaaataatatgctaagaggtgaagctttgaataacttcgtaaaacgtagcatagaattgatttaatatcgcccctttaaacattacacatacttcaagaaagagcattcaacgttaaatacacgttgtaatgctctttttcaatttaaaacgatcggtaaaatatcgattaattgaaaagtattgtatatatttgaacacttaatagacgaaaaattcaattgtttgatttgggttatgagaaagatttttttagtgttaattactttatggctgattattccggctatccatgcccaaaaagtaggacttgtattaagcggtggtggcgccaaagggatgacacacatcggcatcattcgcgctttggaagaaaacaacattcctattgattacattgcaggcacttctatgggagccattatcggttctttatatgccatgggatactctcctgacgacatggtagaacttctcaagtcggaagactttaaacgatggtattccggagaagtggaagagaaatatgtatatcacttcaaaaagaatcttcccactcccgaattcttcaatattcgtttttcattcaaagactcactgaaaagtttgaaacctcaattcctgcctaccagtgttgtcaatccgattcagatgaatctcgtttttgtagacctatatgcacgtgccacagccgcttgtaagggagattttgataaactttttgttcctttccgttgcattgcgtccgatgtatacaacaagaaacaattagtcatgaaggaaggagatttaggagatgccgtcagagcttccatgagcttcccattcatgtttaaacctattgaaatagacaatgtattagcctatgacggaggtatttataataactttcctacagatgtcatgagagatgattttcatccggatgtcatcataggaagcgtcgtgtcaaccaatcccactaaacccaaagaaaatgatctcatgagtcaaattgaaaatatggtgatgcagaaaaccgactattccattcctgactccatggggattttaatgacgttcaaatatgacaatgtcaatctaatggattttcaacgcattgacgaattacacgatataggatataatcgaaccatcagcatgatggattcaatcaaaagtcgtattcatcggcgtgtaaatctggacaatatacgtttaagaagaatggtataccggagtaattttccggagctacgctttaaaaatatcatcatcgacggagctaatccacaacaacaagtatatattaaaagagaatttcataaatcagataacaaagaattcacttatgaggatttaaaacaaggttatttccgattgttatctgataaaatgatttccgaaattataccgcatgcaatttataatccggaagacgacacctacgatctacatttaaaggtgaaattagaaaataattttgctgtgcggttgggaggaaatatatccacttccaactccaatcagatctatctggggcttagctatcaggatttaaactactatgccaaagagtttatccttgacgggcaactcggaaaagtatataataacgtgcagtttatggcaaaaattgactttgccactgccattcctacctcataccgtcttataggttcaatcagtactttcgactatttcaagaaagacaaacttttttcgcgaaataacaaacctgccttcaatcagaaagacgaacgtttcttaaaattgcaggtcggattacctttcctttcgagcaagcgagcagagtttggggtcggaattgcgaaaatagaagataaatattttcagaaaagcgtcattgactttggaaatgacaaatttgacaaaagtcgctatgatttattcggtggatcaatcagctttaatggaagcaccctaaattctaaacaataccctacacgtggatacagagaagctcttgttgcccagatcttcgttggaaaagagcgattctacccgggcgaaggaagtaccaccaacaacaataataaagaccatcactcatggttacaattatcatacatgaaagagaaatatcataatatgagtgaacattgggttttagggtggtatttgaaggcattatatgcctctaaaaacttttccgagaactatacggccacaatgatgcaggctggagagttttcgcccacgctacacagtaaattgacctacaacgaagcctttcgtgccaatcaatttgtgggagccggtattcgacctatttaccgtttaaaccagatgttccatcttcggggagaattttatggctttatgcccatttatccaatcgaaaaaaactcgttgaataaagcatattatggaaaagctttctccaagtttgaatatttaggagaaatttctattgtatgtcaattaccttttggagacatctctgcatatgtaaatcattatagctcaccgaaaagggagtggaatgtcggactaagtataggttggcaactattcaattatcggttcatagaataattttctacaaaaaaagtcgttgaaaagcttgctagttcgggaaaagtccgtatctttgcacccgttaaaacaaaagaatggtcgcgtagctcaactgaatagagtagctgactacggatcagccggttacaggtttgaatcctgtcgcgatcacttttttgaattaacaaaatggccgcgtagctcaactgaatagagtagctgactacggatcagccggttacaggtttgaatcctgtcgcggtcactgaaaacttacaaattatagggtcgcgtagctcaactgaatagagtagctgactacggatcagccggttacaggtttgaatcctgtcgcgatcactgaatcctctgcattttatgtggaggattttattttttcccccatttcatcgaagaaatcggggctcagtctgaaaccttgggggctcagtctgaaaccttgggggattgcgttaaaattcttatttttgcatcatgaaaacatcctcttcccaaacgattgatcctgttgcttctttaagcttgttcttgccttcaggaatccttgattactttaccctagtcaatcatgtttctcaggatacttgctttattctttatttagaggagaaagccactattcctgctgagtactctgatctccatcttcactcaaaaggtttcctccctgagattgaagttcaggacttccctatccgtggtaaagccgtttatttacgtatcaagcgtcgtcgctgggaagatccatccactgggcagacatatagtcgtgactggagtttggtagccaccggtactcgcataaccgctgagttcggtgcttttttaaaagaattacttagataatcacgccgttagctgccaaagtgtagcagagcattactgtatggatggcaaacagcttcaaagccaatataaagatcacttgagtgacttccagaattgggatcagagagcacatgcccaagagtatatcctttatccaaagaatatgggttatcgcctatgtattgacgaaacggctttgagcaagggagatctttataccatcttaataaatagagataagcgaggtaggaaaggttctattatagctgtaattcatggcactaaagccgataatatcattgcggtacttacaaagatgccacaggagctgcgttatcaagtcaaagaaattacactggatatggcagggagcatgcaaaagattgcgaaaacatgctttcccgtgccatgcaggtgattgataggtttcatgtacaaaaacttgtatacgaagctgtacaagagttgcgtattacatatagatggcaagtgataaaagaggagaataaagccatgaaagcggcaaaagagaagggggaagtacataaagcagaagaactcgaaaacggagatacactcaggcaattattagccagaagcagatattta

SEQ ID NO: 8338 - DNA, 1175 bp, Unknown
  gut microbiota DNA sequence
attataacagtcggttgtaatgatgaaggcggacagaatccggcggatatgaaaatctgttatctaaaaacaccagttcagagtgtaataggcactcctcgtgtggatattgatgttactacaagttatcatgcagtcggtatccaatacctccccaatacggatagtaaatatttttatcaattctgtggagattcagaacctattgatgcatttataaatacgtatggaaagtcgatgtatatagactttatgagacactggattcaaaaagcggaagatgcacaggttcctcaagaggaattgtattatacggtagatttcggttatacggcagatgcaaaaagaatgataaccgctaccagcatcggactggatgagaacaagactccgggtgagtatgtccgtcaggactttcatttgaaagaaataggcccgaatgcagaattaccagagtgcaaactggaaattagcaggattggtgcttccatggttgatatgaatgtggaaatggaagataattgcgtagccatgttttatcgtatatttaaggcttcggagtgggctccttatgaaaatgcagatgaagcaaccatgactactttagcacggactctagaccaggaaggatggggtgtgaaaaatacgaattttgctcaaaaaggttcctataaaggtacagaattccaatttgatttgcttcctgatgctccttatgtcgtggcttacattgggcgtaatgagtatgggcagttatccaaagaagtaaagcatgcttcattttctaccaaagcgcgtattactgatactccggatgcatctgaagctgatattgatataacgatcactgatccgggacgtacaagtctgaaactgaattattcatataatcagaaaacagccgtattctatcatcagtatattatgacaccggatttactggaagatgctaataaagcggaattaatcaattatttattgtctgaagactctaatgtatggcctgctgatgcaacaggaggggtggaaagtttcacttggacaggattagacccggctaccgaatatatatttgcatatatggctgaagactggaatggcgtattgacggatgtgaagattgtaaaagctaccactgaagcaattgtggcaggtccgaatccgacgatacaact

SEQ ID NO: 8339 - DNA, 6556 bp, Unknown
  gut microbiota DNA sequence
gaattacactaatgttaattatttattgactacattctccggtttgccagaaatgtaagcctgaagattgctgattgcaatattcatcagacgttcacgagcctctatggttgcccaggcaatgtgcggagtgatgtagcagttctttgctgtcagcaatggattgtcggcacaaggcggttcggtagaaagcacgtctacgccggctgcataaatcttaccgctgttcaaagcatctgcaagatcttgttcgttgataagcggtccgcgaccggtattgattaagatggctgtcggcttcatcatggcaagacggcgtgcattcaccatttcgcgtgtatccggtgtaagcgggcagtgcaaactgataatatcacactcgctgaacaattgatccaaatccattttcttgatttccggtggtaactggaagtgagatttagaagtcaatgcgtacacttgcataccgaatccgatagcaacacgcgctgtggtatatccggtgtttcccaatcctaccagaccgattttcttatcccgaagttccatcaacggagtgtcccaaaaacagaaatccttgttgtttgtccaacggcctttgtgcacttcttcggagtggtgttgcacttgttgagtgatgttcaggatatgcgaaaataccatttgagcaacggaagcggtgctgtatgaaggaatattagtaacgacgattccccgttctttggcagcagctgtgtctaccacgttgtatccggtagccaatacaccgatatatttcagttcgggcagtgcagccatgtggtctgcattgatgattaccttgttagtcagaattgcttctgcaccggctgcacgttctaatacctcttccggagctgtacgatcataaattgtacattctccaagaactttcataccttcccaggataaatctccgggattggcggcaaagccgtctaaaactacaatcttcatttcaatttcaatattaataataagttatacgtgttttcttaacaacatattgatattataggcacggattatacggatttcacgttttctaaaaaataaagcatctgcgtaatctgtgcctgaaaaatatcattttttgaatttgtctccccacaactgtatcatccgttcggcatgcttctgctctgccggattgttttgcggttgccatatccgtttgtctttcagttcgtccggaaggaattgctgtttgacaaagttaccttcatagctgtgtgcatatttatattcctgtccgtagcccagttgcttcatcagtttggtcggagcattgcgcagatgcaaggggacaggcagattgccggttgaacggactaactccagtgcgtcattgatcgcgctgtatgccgaattactcttcggactggtagccagataaatcgttgtttcagctaaaggaatccgtccttcgggccagccgattttcatcaatgtttcaaagcaggcgttagcgagaagcagtgcgttcgggtttgccaaaccaatgtcctcggcagccgaaatcaccagtcggcgggcaatgaaagcaggatcttctcctccttccaccatacgggccagccaatagatcgctccatcaggatcactgccacgaatagacttgatgaaagcggagataatgtcataatgcatctctccatccttgtcgtatgccagcggattttgttgcaaccgttcggtcaccatttcatcggtgatgacaacagtctcttccgtttccgattgcacaacgagttccaatatattaagcagcttgcgggcgtctccaccggagaaacgcaatatggccgttgtttctttcaattcaattttgcgttctttcaatacggcatccgtggtgatggcacgttgcagaagttccaataaatcttctttctccaaagatttgagcacataaagctggcagcgggacaggagagggcggatgacctcaaacgacggattctccgttgttgcgccaatcagcgtgactgttccgttctctaccgctcccaacagagaatcctgctgcgacttgctgaaccgatggatttcatcgataaacagaattgggctggactgtgaaaagaagcggttgctcttggcacgttctatcacttcgcgcacatccttcacaccggaagtcacggcacttaacgtatagaaaggggtttccagtttgttggcaatgatttgcgcaagggttgttttacccactccgggaggtccccagagaataaacgaagagatgcgtcctgcgtcaatcattttccgcaagatagcccccggtccaactaaatgtttctgaccgatataatcatccaaagtctttggccgtaaccgttctgctagtggttgcataattttttagaataccattaataccatgaagcggataccgtttttgttgatacccggattatcacgataagtgaaacgatgtacatactcaacgtgcagcaacttgaaaatgttgtagatacctacacttgcttcgacatacggcactttcgggtccatcacgaaactggtgaacttaccgtcgcgtgtcgggaaacggaacaaatcgggattgttgctcttgaacggattgttcttgtccgtcaatgttccccacagagcacgtacacggaacatttccctccatttcaggttcttgataagaggaatacggttgaagagttttccattcatgtcgtaggataatgacatggaagcgtaacggtcgttcaggaattccatgttattaatcaagttgaacgtttcgcgctgggtgatgtaggacaagttggcttccggcaggattaacaacgggaaaggaactgtgttccattctgcacctgctttcacgctgcaatcaatctttccccaggaagccgggagccagaaacgtttccacacacttgcttccgtgcggttaaagttataatccccgcccaatactcctttgaaacccatagcatgagtgagcgtaaagataggagcgtccagcgacacaggcacgcggcgttgcttggagttgacaaatgattcgcccggcgcatagcgcagcgtcagacttgcttcggaagtcgtgacatcgtgcacacgggtttgtgcggcatcattgcgcaggtattccagtttgccggtaggctcgtcgttacggtggcgcagcatggctttcactccgaatccggtcagcgtttcgagttcataattaatggtggcgtcgcgcatatacgacatttggtctactgtcgttgtcttgaccgacaggaagatattatctttatccgtaaacaggaatttgtccatcggagacattacgtcataactgtacgttgccgaaagataatgtttcgggaactcccaaaccacataatcgcgtttgttgaacgaataagtcaccgttccgctatatttccagcgttcgtctttcagaccgtatgctccgtatccgctcaagaaccagtgcttgtcgaaatgagccgtagtcataccgctcaaccggaaacgggtgccatcaatgtaattgctcgaaatcatggtgttgatagggccgatgtccactttgctcggatgctctttgcttcctgtctctacaaagttctcaatcagtgctttcgctccgaagatgatgtatttgaatcccggaatctgttcaagacggttgacgaatacatccatcgaactttctttctttgtcaatggtacttgacggacactcgcccagtactcatcgcttttcgagagcatatccgcttcttttatcacgctgcctttcaaccggaacagtcgttgttcaataggatcgaatttatagttactatatttcgtggttcgttccacctgcaatccacctgctgttttgttggaattccaagaaaggtctacggtcatgtcatcatccgccaatacccagttgccgttgggcagttgctcatactgttgcgtgatgtccatgcggttgacaaagttgactccggtctttttaggcaggttcattgtacatttctgaacggcgtatgtagaatcattcaatacatacagatgtccggtgaatccgaagtcttgcgagttttgcggaacaaaagtgaggtggacacattcgcgtttgtttaccatcaatgtgtccatcagataatatttataaaatgagatggcattgttaccgatcggactgacgaaacgctgctgaagcaaccggatatcatcatcgtagatattgatgtcggcaaatacgtctttcagtacggtgccaagcatatctcccgtagagaaaaattcttctataccattggagttctttcctttgataatcgttttcttgttttcgggatttttgcggtagatggtttgcgaggacgtttcttgtacggaaatagggagaatcaacttattggttgtttccgacacttccacttggtctcttaagaatgaatattttttgtagatacctttttcgagcttttccggtgtgaggtcgttgatagacattttcatcttctcgtacttgtcgtactgatagtactcgttcacttcgaggacttgtgcctttttgtgttcgattaccttcttcatgaattccactgccggattgtttttgcgggaatatttctccttttgaggtttcacgacaacctcgttcaggagcacattatccggagctaacttaacgttcactgtctgattgttggaaccaacccgaaccgttttactgatataacctacagcggagaataccagtgttcctccgtttctgcgggcttcaagactgtattctccgttaatattggtgatggtacccatatctctcttttcctggtagtaaacagagatatacatcaatggctcgtgggtaaccgaatcagtgactacccctttaatttgctgcgcaaaagcattggaagctaccaatacgagtaagaacagtataagtattttgttatatcgttgtatcataacgtttgtagtagggctgcaaagttaacaaataactctaaggataacagaatatataactttttttacccatcgttttttgttgtttacaagcatatatcgtacgataattcaaagaacatcccgctgttaatccttttgataagaccgtttccgcatttcgttctcccggtttcggtatttgaaacctttgctcccgttgtaggacactttttgtttcgacccttgaaactttttgtttcccggcatgaaactgttggtttctcggtgtgaaacactttgtttcccggtgtgaaactattagtttcaaggcgtgaaactaacagtcccatgccgggaaacggaatggaacatgccgggtaaatgttatttgctcgtaagtatctgtacaatacgctctgcggtacgtccgtcccaacgttcgggaagttcgccacgtttccattcaccgtgcatcagtgtatccatggttttggcaagcagggcaggatcttctccgacaagttcgttggttcccatgcgccacgtttccggatgttcggcatacgtgttgagcgtgatacaaggaatacccaggaaggtcgcttcttcggctacgtttcctgaatctgttatgattcctttcgccttgtttatcagataaccgaagaacaggtagttttgcggcggcatgatatggagattcggagcttcgatgtccaactctttaatggcattacgtacgtaggtatgtagcggtgcaacgataggcataccggcggacttgtcgatgattgttttcatcaactgacgcagattctccttattgccgagtaatacacgacggttgagagtaaataggagataatttccttcttgcagtcccaggacggagaaccatatcggtttgagcaagcggttccggttatagcggatggcatcaatcagaatgttgcctacataatatacgttttcgctttccgttcccgtctggttcaggttgcggttggcaaccatgccggctgtgaacagatagtcggatagtccgtctgtaatcatacggttgacttctttcggcattttcatatcgaaagaacgggttccggctacgagatgtgctaccttgataccttgtttcttggcaacgatggcacaactcatggttgcggtcaagtcgtctaccacaaggactacgtgtgccggattctccgtcagttcttgttcaaaggctaccatgattccggctgtcaaactcgttggattactgctttccactcccagatatacatcaggagctttcatgtcgagatccgaaaagagagaagcatccagactcgtatcgtctttcctcccggtataaaccagtcggtaagagatacttttacccagcgcccgtgcggcttcaatagcgcgtgtaatgggggctatcttcataaaattggggcgtgcccccgcaacaattgttattttcatattgtttctacctaattcggtttaattcgtgaagcaaaagtacattttcttacggaatttattcgttactttgcatacaaaataacaaatatatgcccacattcgttcaaattcttgattttataggcacatttgcctttgctat

SEQ ID NO: 8340 - DNA, 10505 bp, Unknown
  gut microbiota DNA sequence
cgaccctatctatctgatttgtacaggactggctttgttatgggtcatctgtttcggacgctggctcatccggctcaataatactttcttcatttttgataccatcggtctggcactgtttaccgtggtaggtgtaggcaagagcattgctttgggttatcctttctgggtggcgattatcatgggtagtattacaggagcggccggtggagtgattcgtgacgtatttatcaatgaaatacctcttatcttccgaaaggagatttacgcaatggcttgtgtcgtaggcggtattgcatattggatttgcgatctcgcaggtatggagtcctacgcttgtcagttgattggcggatcagccgtatttctgactcgcatcttagctgtaaaatatcacatttgcctgcctatattaaaaggtggggaagagccggaagaataaaaaaacgatactgcccgagtgaatgtgttcatcttatttttatcggatagctaataattaatagtttatattataaaattaggcacggattacacggttgctgtatggtaatcatcattctaacaactgtgtaatccgtgcaatccacgtctaataatacaaaattatttagcccgtttttcttacttgttttttatttcttacttacttattacttacttacttctcttcctttatatacagctccccctgaaaactaatggactgacggttttgcatattgacatcaatgcttgccgaaccattggggaatactttgactctgtattcatacctgtcttcgggattgcgtgcgataaactcgatgacggcatttcctttcttatccattttcatactgtattctttgagcacagctttaaaatttagcccgtcgcctccgccataggggatgctgtaagcccgtccataataaggcagataagaaatgaccgaatcgtttctgatttccagtgagtaggaagatgtcaaagggatggagcgtccgcgcatcggcatggcggtgttgacatctatcttgtagttttcagattcaatcagcttctttacggcttctttcttctgttctttcttttcctttttactttgagccgaaagggtagggatgcctactagcaaggctagtaacagcataaagatttgtttcttcgttctcatatcagttgtatttaggttgatgtatatatgtataacaaccaaatataagaaaaagacagggatagttctgtttcctttaatgaaaattaaacagaaatccctgttatttataagtttagaccaattaagggcataatcaacttttgaataaaaacgcttgggaagaaaattagaacaggcttttagaactgttccagtatttcaattcgtttttcaatgggaggatgagtggcaaacaatccgttgattccgctgaatatacttttcgatttctttttaggattctgtataaataattgcgccacgtctttcctttctactgcctcgatggcaggatctgccgatattttgcggagagcactggccagtgccaacggattcttcgtcatttctgccgatcccgcgtctgccatgtattcgcgtttgcgtgaaatggcaaaacgcatcaggcttgagaaaagataaccgatggcagctatcactaaagcgagtagaatgaaaagaaaaatgccgccactacctttgctgttgctgcgtacacgtatgtgcgtgatggtatataatgtgatttctgtcagcatggaaaagataccgacaaagacgatggatattatcagcaagcgcacgtcacgattgcggatatgacttagctcatgcgcaatcactgcttccagttcttcatcattcagttttttgatgataccttccgagagggtaacagtgtatgtacgttcattgatgccgcttgcaaatgcattcagagaactgtcatagatgatattgattttcggcatcttcatgccttgcgacatacataggttttccaccaggttgtaaacgcgcttattctctatacgatccagcggtttggaaccggtggcagaattgataatgcttgtgttggtccagtaggcaatcagaaaccagatgattacgattcccatggtgtatggcaacgaagagagaaagaaatgattgaccattggcattatttctatttccatactctttccgtatcccaaaagaaccaacaggtagcaggataaatagaggagtgctgccacgagacagggaaacaggaacagtagaaacgcagagcgcagattattccggctctgctgtgtttggattccgacgtattgcatgcgtgttcaacttttgtaattgagtggacggtgtgaataaagagtttagaaacttattttaggtgcctgatccagattcgcacgttcattcttccccaggtcgaacatgatttctctttggaatccggtcattcctgctactatattcgatgggaatgtctgtacggcgttattatattctttagttgccgagttgaagtaacggcggacagcagccagtttattctctacatcagcaatttcttcctgtaattgcaggaaattctgattagctttcaaatcgggataagcctcgagagtgattttcaatcctgcaagagcagagcttaactggttttcggcagctatcttatcatcaatcgtttttgcgccgattgcaccgttacgtgcctgaatcacccgatcgagcgtttccttttcgtgtgcggcatatcctttcacggtgtctaccagttggggaatgagatcatggcgttgtttcaactgtacatcgatgtcggcaaacgcgttttcacgattgtttctcaatttcactaatgagttgtacatggaagcaaaaatgatgcccagcaatacaataatccctacaataataagtatggtcatagctttttgttttatttaataatataaaatcaaaagtaatctatttggttcttttaaccaagtagtagggggtaaatttcgcaaataccacctaaaaactatcagaaagcacctaaaatctgtcatttgatagaatttcaccctaaaaaataacggatcctaccctgcttgataagcaaaatacctttaaacttgcaaacatcgagaaaaacgaaatattaaccataaaaccattaaagtatgaaaagtttaagtttcagaaaagatttaattggagtacaggaagagttgcttcgttttgcttataaattgacggccaaccgtgaagaagcaaatgacttattgcaggaaacatctttaaaagcattagataatgaagaaaaatatgttccggacacaaatttcaaaggatggatgtacactatcatgcgtaacatctttataaataactaccgtaaaatagtacgcgatcaaacttttgttgaccagactgataattattatcatttaaatctgccacaagattcaggatttgaaagtacggagggcgcttatgacctgaaagaaatgcaccgcatcgttaatgcacttccccgggagtataaaattcctttctctatgcatgtatcaggttttaaatatcgcgaaattgcagagaaattaggattaccgttgggtacagtgaaaagtcgcatatttttcacgcggcaacgtctgcaacaggaattgaaagattttgtataattgggggataacacatataaacaagtttattagcagaaggagcaaagagatagattctcattgctcctttcttttttataacttaatcgtaaatcacctaatcgtctaatcgtaaattaaactaggttataaattctttcttgttatttgcttttctttttttgctttttttcttttcaacggccttctcttccggtgggaatttaggaactagattcatcagccgtaatatctgattttgtcgttttagtatgtatgacgaaggtttcgccgagttaaatcgtatcgggttggggagggtggcggcgatgagtgcacattgtccccgggtcagcttgtcggctgttgttccgaacttattttttgcggttgcttgtgcgccgtagatgccatttcccatttctatagaattgagatagacttccatgattcgctctttcgaccagaagagttcgatgagaaacgtaaagtagacttcgagtcctttgcgtacccacgaagattgcggccataagaacacattcttggctgtctgctgactgatggtgcttgctccccgtttccgtttgcgtgtttcgttttctttcatcgctttcttgatttctacgaggtcgaacccgttgtgttcggcaaaacggttgtcttcggaggctatgaccgccatcggcaggttgggagatatcttatcaaaagaaacccacgtgtgcttccacgtgggtttatctcctgaaaaaacttgctgaacgcttcggataaccatcaacggagttacataaaccggcatgaaacgataaataatcacggccagtagtgttgatgcaaagaagaaaatcagcaggttgcgcgtatagcgcagtaattttttaatgagtagctgcttgtgcatctctaatcatttgttcacttgcgtacatgtatacttctacacgacggttttgttcgcgaccggcagcagtgtcattgcttgcaacgggatcgctttcacccattccttgtacactcttgatttgattggtggaaacaccgcaactcaacaagtaactggacacgctttgcgcacgttcttgtgataagttcaggttcttttgctggctttgtgcagcagtactgttcttccagccctggttgtcggtatatccgtagatagacacgtccatatcccggttctggttgagcacattgttggcaaacttgcttaaagcagatttagcagcagcacttagatttgcattaccggtagtgaaaagaatacccgagtcgaatgttactttcacggcttgcaatccgttgttgtctgttatctgttctacttgtgcgccttcaatttgttttgcttctgctgctgctttgtccatctttttaccgataagagcacctgtacctgcacctactgccgtaccaatagcagcaccgatagcagcacctttacctttaccgataacacctcccaggatcgcacctagtgcagcgcccgaaccaccaccgatagcagcacctttaccagtgttgttcatacttccacagctaccaaatatcatggcaatactcatgaagagaaccataaatttcatcttgttcataatgttgatgttttttaattggtttataaaaaatgtttttatacgaatcacttcgcattattaataacaatgcaaagatacatattatttggcaagcgtgtactttttaagttaaaataactcggaagagcccctttgtttgttaataaagggaaatgataattatccttttatcgttgaaggaacactcaaacacttctttttaataataatgaaccaactcaaaagaattaaccctttggcaaccgtggtgatgcagactgcccaccagattccttccactcccatacccatccgtacaaacaggatggcaagcggaatacgcatatagttgcaactgatgctgataatggcaggagggatggtgcgtccgatgccgtagaatactccttgcatggtgatttcgagcatcataaaaagctgcgaatatccgtcgatacggaggaatacacctccggcttcgtaggccgcctgttcggggacgaatatggcaaaaacttcattcccgaagaaaacgaatagcaatgtacagaatgttccgaagattcccgtcatccatagagtcgtataccaggctctaagtacccgttccactcgtccggcggcgtagttttgggcgatgaaggcacttagtgcggtggagaatccctgtgaggtattccaggtgattgcttcaatttgccctccggtggtaaaagtcatcaggccgatgtgtcctccctgttccgaagcggtgcggcaaaggaacatattgacgaaagcaaatagcgtattcaaagtagccacgggcaatcccagtttaaagattctccgtgtatattttttctttagccgcgtgaagaaagggaaaccgccaagcagagcatcccggcaacgcaactgataaacgaaaatcaggaaaacacttgcttccgcaatccaggtagcgtatgccgcaccgttggttcccagcccgaaaccgaatataaagagcgggtccagaatgatgttcagtatcaatcctgtgccgctgataaagaacgggactttactgcgccctgccgcattataaattccggtgaaagcagcggaaaggaaaataaaaggcaatccggtagaaacaatccgcagatattggatggcattggccgtaatatgatcctcgagttcatagatgcgtatgataggttctgcaaatataaaaaggagtgtgccccaacagatggaaataatcaaagcaatcgtgatgttatgagacgcgaaactgcgggcatcttcctggctttgcgcaccgatggattgtccgacactcacttcagatcctaccttatttaataaggagatagaaccggacatccaggtcaggattccgacagaaccgatggcggctacggcttcacttcccagtcttcctacccacgccatatcagtgaggctatatgccatttggataaacgacgttgccatgatcggcattgccagattaaatagttgacgattgataggaccttgtgtcagattctttattccttgcatataatttttctaatcaaaatgagctgcaaagatacgcaaaattactatcttcgcgcatctaattattcattaatcaaagtacatagatactatgaaacagaaattctctactatttttatcttgctgcttctcttttttgctggttcacgagtggtagcgcaaaatgctccgaaaccttttgatattgaacaaccttcacttcgcgtatttcttcctgcgccggaactggctacaggacgtgctgtggttgcgtgtccgggaggtggatattcacatttggcattcgaacacgaaggctgtgattgggcgccctatttcaataaacaaggtattgcattgattgtgctaaaataccggatgccgaacggtgatcgtacattacccatttcggatgctgaagcagcaatgaaattggtgcgtgacagtgctgatgtctggaatttgaacccgaatgacattggtatcatgggctcttctgccggtggacatctggcttctaccattgccactcatgccaagcccgaacttcgtccgaactttcagattcttttctatcctgtgattacgatggataaatcttatacccatagaggctctcacgacaaccttttgggaaaagatgcttctgctgaattggaacttgaatattctaatgaaaagcaagtgacgaaagatacaccgcgtgcttttatcgtatatagtgatgatgataaagttgttccgcctgctaacggagttaattattatttggcgctgaacaagaacaatgttccttcagtgcttcatatttatccttccggtggacatggatggggaattcgcgagggtttcctctataagaatgaaatgttggacgaactgacgtcttggctccgtagtttcaaagttcctcataaagatgctatccgtgtagcttgcattggaaatagtattacgtatggagcacgtatcaagaatcgtgatcgtgacagttatccggccgtgttgagccgtatgttgggagaggcttattgggtaaagaatttcggagtcagtgcacgcactctgctgaacaagggcgatcatccttatatgaatgaaaaagcttatcaggatgcgctggctttcaatcctaatatcgttgttatcaagttgggtacgaatgacagtaaatcattcaactggaaatataaggccgacttcacgaaagatctgcaaacaatggtcgatgctttcaaagcgttgccagctcaaccgaagatttatctttgttatccttctaaagcctatcagaccggtgataatatcaacgatgatatcatctctaaacaaatcattccgatgataaagaaggttgccaagaaaaataacttgtctgtcatcgatcttcacgcagcaatggacggaatgccccagttgtttccggataagatccatccgaatgaagaaggggctaaagtgatggcaaaagctgtttatcagtccttgaaaaagtaaaataaggaacttgacgattgtaaaatttccggttgaaataatctcttttagagaaagttttaaccggaaattttttagtttaatcacaaataatcttcttataatatgctaaaaaaagtgtctttctgaaagttagatttgttaccaatctgtatttttgcgcccgaaaaataataaaatgataaatagcgttatgaatagactacaagattttacctttttctcgcagttgatggctaacgctaatatgggatggtggaaagccaatttatcaactgcgaattatgaatgttctgactttatagtagagttattaggtctggatcagaccggagttattagttttgaagatttcaataaacgtattcagaaagaggaacaactttctacaactgttcattcttatggtgtgtatcaacggccggaggtggtgtatttgcttgatacggtgaaaggatctgtttgggtacgtagcaaggtatgctttcaagaaacggatgaagacggaaacgaaatcatttatggtatatccgaagtgcaagatggtcctgatatggcatctgcttaccaagctttgcaatacagtgagcgtctcttatctaacattttcaagtgtttgcctattggtatcgaattatacgatatggatggggtattagtggatttgaacgataaggaattagaaatgtttcatatagagaagaaagaagacgtattgggtatcaatatttttgataatcctatttttccgaaagaaatgaaagaacggctgaagaaaaatgaagatgccgactttactttccgttatgacttctcgaaggttggatcgtattatcagaatacccaaaaacagggtacgattgatctgatgactaaagtgactacattatataatagtgagcatcagccaataaactatctattgattaatgcggataagacagaaacaacggtagcctataataagattcaggagtttgaggagttttttgaactggtcggtgattatgccaaggtcggttatgcccacttcaatattttgagtggacacggctatgcccaaaaaagctggtacagaaatgtgggtgaagcggatgaaactccgttgtccgacatctttggcacataccggcatttccatcccgatgaccgtgccttgttgattcggtttttggacgacgcacgaaagggacttactaccaaacttagcaaagagatgcgtgttcttagggaggatggcacatacacatggacgcatgtcaatctgttagtaaagaaatatgccccgcaagaccggattatcgagattatcagcatcaattatgatatcacagaactgaaaaggacagaagaaatgcttgtcaaggcacgtgataaagctgaagcgtccgatcggttaaagtctgctttcctggctaatatgagtcacgaaatccgtactcctttaaatgctattgtcggcttttcaagcctgttgactagtacggaaaatgcagcggaaaaggaactatataattctctgattggacataacaacaaactattattaaatctgattaatgatgtaattgatctttctaaaatagaatccggttatctggaattgcgtccggactgggttaaccttaccgagcttcttgacgagagtgtagcggagtatgctcatcaagtaccatccggcgttgaacttctgactaactatccggcacatgattctctggtagaactggacaaattgcgtatcaaacagatcttgagtaatttcctttcgaatgccttaaagaacactaccaccggacatgtggaagtcttctatgaggtagaccaccaatctgtcagaatcggtgttaaagataccggtcggggcatcccacagaatatgcttgaaaagatattcgaaaggtttgaaaagttggattcctttgctcaaggggccggtctgggcttacctatctgcaaactgatcgtcgagaagatgaacgggcggatattagtcgattcccaactggggataggtactacttttataatcgaattaccgtgtcgctctatgcttgttgaataagtatatgtgaagaatattaaaagaaaaatcccttgataacgactgattatcaagggattaattttatgtttcgtgatccgcctggggctcaccaatatcttgtaaatctctgatattcagttgtagttttcaatctttcaaatcatctccaccgatttcgcagtgtgatactttccgcgttttgcgagccactctttggcttttttctgatgca

SEQ ID NO: 8341 - DNA, 2179 bp, Unknown
  gut microbiota DNA sequence
ttttttcgtaggacgttgccctacgctatataattaagccctttcagggcaccccaataaatatataattgtaaggctttcagcctaaccgctaaaatctcatttaaccgctaaattcccatttaaccgataaattcccatttattataggctgacaggttcgtatttcaaaccaaatacatcggctacagctttataaacgatttttccttctacaatattcagtccaagagccaatgccggattatctttgcaggcttttttccatcccttatttgctaaagcgatcacgtaggggagggtagcattagtcagtgcaagagtggaagtataaggtacggctcccggaatattagctactgcataatgaacgattccgtctacaatataggtcggtgcactgtgggtggttgggtgagaagtctcgaagcatcctccctggtcaattgctacatctactaatactgtgccgggttgcatcatcgaaagcatctctttagtaatcagatgtggtgctttatcaccgggaatcagtacagagccgacaactaaatcaacatccggcaattcttttctgattcttagttcggatgagtacaatgtctttacattcttcggcagtgtctcgctcaaatagcgcagacgtgccagatttatatctgtaatagtgacatctgcccccattccagcagccatttgtgcagcattgctacctacaactccacctcctaaaattaatactttagctggtttaacacctggtacacctcccaaaaggataccttttccgccttgcggtttttccagaaaacgggcaccttcctgaatagacatacgtccggcaacttcactcatcggaattaataaaggtaatgtgtggtctgcttcttctacagtttcgtaagccaggcatattgatttattggagagcatggcaagggttaactccctgtcggaagcaaaatggaaataagtgaatactaactgtccttttcttattaagttatattcagtgattatcggctctttcacctttacgatcatctcggcagtagcgtaaatatcttctattgttggcaggatatgtgcgccgacagcttgatatgcttcatccggaaaaccgctatttattcccgctgtatgttggataaatacccgatgcccttgttttaccacttcagccactcccgaaggtgtcatgcctacacggttctcattgtttttgatttcctttggtactccgataatcataatgttgcgtattaaagatttaacatgttcgaaagtacgaaaaatccccttacgttgttgttcgtaaggggatgttttagaacagaatgtcttcgcgtgttgagatgaataaatgcgtagagtggttgttttatagacattcactgccctgcttgttgattttcatgctttttccatagagacccactcgagctatgttgttataaaagggttctgcaatatcgtacttaaaaggaagtacttcttcattatctttgtttatgtatccccacttggacgactggctttcaatacaaacagcagccaatccttcagaaaaagagcatccattatcatattccagcggaatgacaacttctcctttcttattaatgaatcctactttgttgtgtagtgagacgagggctaatccttccgcgaattgctccatttgactgtaagtcggtggaagaatgtagtttccttgtctgtcaatcagtccccataatccatcgtgacatactcgtgcacattcttgctcaaacgagtgagcggctgcgtatttaaacggaatctgtacttgtccggtatggtcgatgaatccgtattgagaattgagcactaccatccctaatccttctttaaacgagaaagcccgttcatacattagaggaatgacaatgtcatattctttattaatgtatccccattggatttttcctttaaccggtgccaatccttcagagaaacggccaatagccgagaagcgctttttcttattagctaccccataagctaaaaaagaagcgaagaactttgtaatagtgctgctcattttctttattgtttgtgtggtaagcgtccggataccatatatatacaagagaagcgtggacgtcgttagttcattctattcaaggctctggtaagcccaacagtgaatgaacaa

SEQ ID NO: 8342 - DNA, 2043 bp, Unknown
  gut microbiota DNA sequence
gtgtttgcgaaagaaaatggcgtttacaacctagcgtaaaggagtgaatgaacctatataaatgcgttctattttcagggaggtggcatttattccgaataggtcggtcacatctgatttataatcttcagtcacatcttccactaaccaataaggaatcggtccaaggtctcgtgtggtgatactctttgaagtatcggaacgttcgggaagtttaaatttgcagtcatactctttaccattgattgtaatttggaatgtagtgcctgactctgatgtggagcgggagaagcttccttctattttcggagtattatctttactagtaacaattgtcactttaccactacttttttggtcataagagaaagctattcctcctgtagcttgtatacccgcttcatcctttatcttttttatgaccgcttctagtttttctttttgttgttcatccaacagacttttatctattcctgtgattcttgcttccacagaattcactgaaaaagattgtttgccgttgacgacctttagccctatttttatgattctcccatcagcgtcttttaccatcaatgacgtgctgcccagttttatagagctgatttgaatatcattgttttcgtctatataagctgttgctatttgcccatcggctatttcagcagtataaggagctacgccacccttaattcccaactttgtacctcctgtaattggtaaactggtttcactgataggaggttccgggtcgaacatcacttcccaatattcatataggtaaaaagcatcagcttcgtcgctgcatgaataaaatacaggaagggagcataatagaataaatagtagacagagcttcgtcatttttgctttcatgatattcttcttttttatttcttcacaaaagtaaagctcctttcctgtatttcaaagtatattgatgaaaaataagattaaaactctatcttatgttgtttctcatcatccaccacagccatcattccttctacctgtgctaaagccagcatacgtccgtggaaagaataaccggcattgtagcctttatcctcatctccgagcatcattcgtccatgatctacgcgcatgggaagtcccggattctctttctcgaaaatgcggatgagatcaatcagatgtcctcttcctgatagatgagaactttcgatgaagtttccacccggcatggcctctgtactgcgtagatgaacgaaatgagttcttcctgcaaacttctttgccaattcacgagtatcattatgtgcgcctgcgctaagagaacctgcacagaaagtcagcccattatgcggattgtctacggcattcaggaaccaggctatatcttcttcattggtgacaatacggggtaggccgagaacctggaatggaggatcatccgggtgtacgcacatgttgataccatattcatcgcatacaggcataattgcagaaaggaagtaacacatattctctcgtaaagcgtcccggtctatgtctttatataaacctaacagacgtttgaatatagcaaccgggtttttatctccttctttgatattaccgtttacaaatccttgtgtcttgacgataatagtatcaatcaaattgtccttttcggtatctgtaatcactttgtccagttcggcaactttatgcagttcttcttctgtatagtctttttcagctccttcacgttccagtattttgatgtcgaagtaagcgaaacgaatacggtcgtagtaaagcgaactggtaccgtccggccaagggtactgtaaatccgtacgtatccagtcgattaccggcatgaagttgtaacagactgttttcactccgcatttacccaagttggcaagacttactttataattttcaatcaactgttcacgttccgtacccgcatacttgattgcctcacaaaccggaagactttccacgaccgaccagcgcaacccatacgattcaatatacgattttaaatcgttgatggcttctactgtccaaatctctccgttcggtacctcg

SEQ ID NO: 8343 - DNA, 3464 bp, Unknown
  gut microbiota DNA sequence
ttagaggataacgcaaaatataatccaccacaacaaacaacagcttttaagaagctccttcatctctaaattccttattcataggctattcagaagaaagatgaaggagagaataaaaataaaaaaatcataggctgatttaaaataaatatcccaatgattgaatttaatcattgggatatttattttaaacacttcgatgtttattatgaactagtcaagagtccatcttttttcagcatttaatatttaattcattcaaaaccttacgtattgcctcaaatgtagtaatacgagtaggaaccagcggcaaacgaagcttattttcaatcatccccatcgcatttaacattgattttacgcctgccggatttccatcgacaaataacaggttaaataattccgtaaatcgatgatgaatagtcaacgcattggcaaagtctccttgaagcgccaaacgtgtcatgcgactaaattcacgaggaaaagcattaccaatcaccgaaatcacaccaacagcacctaatgttatgagaggaaaggtaataccatcatctccagagattacattaaagttttccggtttatttttaataatatcatccatttgcgtgatattgccggatgcttctttaatagcaactacgttattgaaatcacgggcaatccgtaacgtagtttcagcagtcatatttactcccgtacgtcccggaacattatacaatacgatggggagctccgtagcttccgcaatcgctttataatgctgataaataccttcttgagaaggcttattataatacggcaccacagacaatatcgcatcaacccctgtaaaatcatcgtttttcaatgtttctacaatagcgcgagtattattaccacctacacccaacagaataggaattcttccgttgacgcggtcaattaccatcttttttatagttttcttttcttcctcggtcagagtcggtgtttcagctgtagttcccagcacacacaagaaatccgcattattctgcaatagatagtccaccatacgcatcaacgcgtcatagtcaacgctctcatcctctttgaaaggagtaatcagtgctacccccattcctttcaatttagtctgtatcatgagttttaattataatctctaatttatttagccgcaaaagtacgaatatttttcttatcttacgatataagtttcagaaattcgtcttcgcttaatatggttattccaagtttttttgctttttcgagctttgcaggtcccatattatctccagccagtataaaactcgttttcgcggaaatgcttccaacattttttcctccgtttttctcgataagttccttatattcgtcacgcgagtgatggataaacacaccgctgataacaatagactgccctgccaacttatcagtgtatccactcaaatcttcctctgtgcgataaagttgcaatccagcctcctttagcctgttaaccaactcacgattagactcattagcaaaataagcaagtatactttgagctattttttctccgatttcatcgatacttaccaatttttcaagatctgcctgctgtaaatcatcgatattctcaaacgacttcgcaatctttttagccacagtctcaccaacaaagcggattcctaaagcaaagattacacgctcgaaaggaactgttttactttgcgcaattcccgttacgatattctctgccgatttttcacccatacgatccaaaccttttatatcatcaactgtaagtttatacaagtcggccgtattttcaattaatcccaaacgatagaacatatccaccgtttccggccctaatccatcaatattcatagcctttcgactaataaaatgctctattttgcctttgatttgaggaggacacgctgtttcattcgggcaataatgagcagcttctccttcatatctgactagtttactgccacattcgggacaattaacgatgaaccgaaccttctcaccaagcataaaactacgtgcatctttatcaacccctgtaatcttaggaataatttcaccgcctttttctacataaaccatgtctccaatatgcaaatcaagcccctcgataatatccgcattatgcaaggacgcacgttttacaaccgtccctgaaagctgcacaggatccagattagctactggtgtaacagctccggttcttcctacctgataagtcaccttattcaaacgggtcaacgcacgttctgcctggaatttataagcaatagcccatcgaggagatttagccgtaaagcccaaattcttctgctgcctcaaactattcacctttaaaacaatcccatctgtggcaaccggcagatttttacgctctacatcccaataattgataaattcaaaaacctcctctaatgtctggcacttacgcgtcaaatcagagattttaaagccccattttgccgcttcctgaagattttcataatgtccgtcacaaggcaggttatcacccagcaaataatacaaataagcatccagtttgcgggaagccacaatagaagaattctgcaacttcaatgtaccggaagccgcatttctcggattggcaaaaagcggctcttcacgcgcttctttctctcgattcaactcttcaaacacttcccatggcataagaatttctccacgtatctcaaaagaagcaggataattatcaccatgcaatacaagcggaatagaacggatcgttttcacattatccgtcacatcatcccccttttctccatccccacgggtgacggcacgaaccaactttccatcttcataagtcagcgaaatagaagtaccgtcatatttcatttcacaacaaatctcgaaatcctcattcaatgccttacggacacgatcatagaagtccgtcacttccgcttccgaatatgtatttgccagtgacaacataggatatttatgagccacttgcgtgaaattcttgttaaaatcgctacctacacgcatcgtaggcgaattttcatctttatattccggatgtgcctgttccaaatcctgaagttcacgcatcttgtcgtcaaactctttatccgagatttcaggagcattcaacacataataattataattatgccggtgaagttcggcacgcaattcctctattttttcctttatatccatatttcttcgattgtttaaggcaaaaatacatgtttatctttgaatatttgtacttttgcgaaaaattaaaagattatgcgtattgatattataacagttttacccgaaatgattgaaggattcttcaattgttctatcatgaaacgagctcaagataaaggacttgcagagatacatattcacaatctgcgtgattataccgaagataaatatcgccgtgtcgatgattatccttttggagggtttgccggaatggttatgaaaatagaacccat

SEQ ID NO: 8344 - DNA, 2179 bp, Unknown
  gut microbiota DNA sequence
catagaaactttgtttgcatactcatgtccatacgctaattcagcacccagcgcccatgtttcattaaagttgtatccgatttccggagcaattttaaaagaagtagtgttgcctgtgctgttacgccaaacgttcaaagatccgcctacgtaaatgtcttgtgcttttacagcgatagttgctaacatcacaactaccaataataaaccctttttcattttctttgttttttaaattaaacgttagaccccaattcggtcgattgatttctgggtgcaaatgtaaagcagtttttatgaacaaacaaacatttagttagttttttataataaacaccaaataaatgtttaacggagactctgtacatcatattatatagcaacacaaaattcttgctatcgattcttattcaaatatattgcatgtagtgagtgttgtcataccataataagccaaaggatttaagaagtaatgaggactgtttctttaagatttagtatctttgacgggtggtaagcctttcagccatcagacacagacgcgtttgactgacattgtatagtgtaaaatgcttcgttattatgaaagtaaaggcaataaaacagttagtttaaacgattgggtatgtcaatagaaataaagtatttcgagaacagaaaagattggcgaaagtggttgaatgacaactttgagattgccaatgaagtttggtttgtatttcccagcaagtcttcaggcgaaaaaagtatcacatacaacgacgctgttgaagaagctctttgtttcgagtggattgacagtacaataaaatcgctcgacaaagaacataaaattcagcatttcacacccagaaaccctaaaagtacctattcgcaagctaacaaagaaagacttaagtggctattggaaaataaaatgatacaccccaaatttgaggataaaatacgaaatgtattatctgatcctttcattttccccaatgatataattgaaagattgaaggaagataagacaatatgggaaaattatctccatttttccgacgcatataaacgtatccgaattgcatacattgaagcagccagaaaacgacctgaagaatttgaaaagcgattaaacaactttatcaataaaacgaaagaaaataaaaaaatcagaggatttggcggaatagagaaatactattcatcccaactaaaaatcaatgataatctaaaataaaataggctgcaaatactttcacaagtatttacagcctatttatcagatagttaagtacctaaccagcgtatttgactatccttctatcgctgcctgcgccgccgccagtctggcaatcggcactctaaatggagaacaactaacgtaattcaaacctacccggtgacagaacttcacagaagaaggttcaccaccatgttcaccacagataccacatttcaaatccggacggatagcacggcctttttctgtcgccatacgtaccagctgtcccacaccattctggtcgagaacctggaacgggtctactttcaaaatcttcttttccagataaacaggaaggaaagaagctatatcatcacgagaataaccgaaggtcatctgcgtcaagtcatttgtaccgaatgagaagaactcggcagaagaagcaatacggtcggcagtcaaagcagcacgcgggatctcgatcattgtacctactttgaagtcaatactatctcctacttcctcaaacaatttcttagcttccgagcgaatcacattttcctgctccttgaattcatacaagataccggttaacggaaccatgatttccggatgagtttccactccttctttcttcagttccaatgcagcacccaaaattgcacgtgtctgcatttgagtaatttcaggataagtattacctaaacggcaaccacggtgacccaacatcgggttatgttcacacagtgattctacacgttgctggatatattgcaggcttacacccattgtatccgccatttcttgctgtcccttcaaatcgtgaggaacgaactcatgcaaaggaggatcgagcaaacgaacggttaccgggcaaccagccattgctttaaagatacctttgaagtcttcttgttgatatggaagaatcttagccaatgctttccgacgtccttctgcattttccgccag

SEQ ID NO: 8345 - DNA, 3677 bp, Unknown
  gut microbiota DNA sequence
aaatctagtcacattaccgcaaggaatcttcccagaatggtacaatgaccaaggatatacagatcaatacggcaatgttatcaatgcagaagatgggaaaattgtagcaggaaatacattccgtgaaaatccatgggcaatgctaaatcgttccggctacttccaggacaaacaattgtatggttctttccgcacaaaactctcacaggatctttccttcataacagagggattaaaagcttctgttgctctgtccatggattcacgcacaatttcttctatcaaacgtactataactttcgcatattacgaaaaggatgccacgaatgagaacgttctccgccggacccgcgaggatgactcgatgataaacaaggtagataataccagttctttccgccggaccggtatcgtggctcaattagattataaccgtacctttggaaaacatggagtttcggctttagctttctatgaacaatatgaaagtaatgatgaaatggtattgccaacccgattccaaagcgtaaatggttggttcggctataattatgataaaagatatggcatcgatgttatcggagcttatcagggatctcacaagtttggtccgggacacaaattcggtttcttccctacaatatctgccggatggactgtttctaacgaatctttctggaaagatgcaaaaaaaatagtgccctacctgaagctaaaagcatcttatggacaagtcggcaactcatccggcgtagatgccttttattacagaggacgtatgtggccgcaaaacgaagtctatattacaggggtaaacatgggaacaaagcttggaggatacattcaggatatacttccaaatcccggattgacttgggagaaagctagaattctgaatatcggaatagatacccgactattttcagaccggttatctgttacagcagaattttttaaagacaaccgtcatgatatgtatgtagtaaataacaaaatcagttctcttgtcggcaatgtaaaggaatttaagcagaatataggcaaaatcaatagccatggagtagacttatctgccatgtggaattcaaatattgcagactggagctatttcataggtggtacattctcttattctacgaatgaactgattgcaaacggtgaagtagatcagccatacgaatggttgaagaatcagggacggcctttaggagaaaatcgaggatacattgcaaaaggctttttcaattcttgggaagaaatagcagcctcccctgtacaaacattctctgatgtccaaccaggtgatgtacgttatgaagatataaacaaagacggacagattgatgtaaacgatatggtacctatcggttacggagacattcccagaatcatgtatggtattaacttaggagtcggctacaaaggattttcgatcaccgcattatttcagggagccgcaaaagtctctcatcaatattcggacattgtgatgaatcctttcacagataacggaaccatatttgagcatcaacttgattactggacacccgaacaccagaatgcaacattcccacgtttaacaacactggacaatgccaatcttaataacaggcagataagtacattaaatgtgaaagatgctgatttcttaagattaaaaacgctggaagttgcctatgaccttcctacaaaaatgatacagaaaatccatcttaagggattgagacttttccttagcggaacgaatctgattacctggacaaaatataaatgggttgatcctgaagctccttcactggcagctcctttgacgagaaacatgagtataggttgttccttaaaattctgatagcatgaaaaaatcgataatttatttggcaataagcgcaacactaacattttccggttgtgattatctggatgacatgccctatgactgggcccagcctgatgatatttttacgaatgaacagaactatctgaaaccgattaatcaggtgtatgcatatattcccgaaggcttcaaccacgtaggaaatgcctttttagatgcagccaccaatgatggaataagtacaatcatagattcggatattcataagttgtctcgtgggtatatcacttcttcaaatccgattgaagaatgttggaataagtcatacaagggaattcaacaagccatttttgcccgcaagtatttgcgtgaggctgacttggtgttacaaaataagacagaagaagacatccaagcatttaaagatacctattgtgcggaaactgaatgtttacaagcattatttgagtttaacctgttaagacactacggaggctttcctattgtcgatcgtatttacgaagtcgacgatcctgaactgcagacaaaggcaagagactctttcaaagactgcgtcaatcacatcgtacagttatgtgagagtgctgccgctgtattaaaagttgatccggaaggtgggaatggttcttatggccgtatgactaaaggaatggcacttgctattaaagccaagacattactctatgccgcaagcccactctacaacagaacagataataacgatccactactaggctatactgacggctcggatgtgacggaacgttggaaacttgcagccaaagcttgtgcagatgtaatcaatctaaatgcagacggaacaatatctccgaatggaagtaaaaaatatagtctgatagctcttactgctgctaaaacgtacgacaagatctttatcaatgccaatcctaatccggaatatatcctattctatacggctgctaaggacaatgctctggaaaacagacattatccccctacaatctcaaaagatcagggaggaggtacagtaccttcacagcaattgatcgatgcatttaccatgaaagatggaagcgattatacccattcttctgacggtgcaagcatgtatactaacagagacccgcgtttggcagcaattatcggatatgacggttcggtttatggaaagaataccatttatacgcgaattagcgataacacaaccatagacggactcaaccaagtgaagaaccgttcgaccaatacgggatattatttagctaaattcctggacaaaacactgaacttcggacaggccaatgtgggtaccgttttccacttattcccgatgattcgcttatctgacatcctactttcctacgcagaagccatgcatcacgcttacggcatgagtgtggatccagaaggctatggtttgacagcaatagaagccgtacaaaaaatacgtaccagagccggattcgaaacaaatgataaatttcttaatggggtgacagataacaactttatggaaaaagtgaagcaagaacgccgtatcgaactctgttttgaagaacatcgttacttcgatttgcgacgttggatggatggcaatcaacttagagaacctattatcggaatgaaagtagaagaaaatgcttccgggcttcattatacacgcattacagtagatgaagcacgcaattttaaagattacatgtattatcatcctattcctctgaaagtaatcaaggaaagcccttccatccaacagaatccaggttggtaacgggcatcaaaactatttaatagatagaaaacatgaaaaagataataatattattcatatgcttaacca

SEQ ID NO: 8346 - DNA, 511 bp, Unknown
  gut microbiota DNA sequence
agtcaaagttgccggtatcttttccggagaaaacattgagaaataaggctctgatatctgatatggattatgcggttcaggcattgaaacccacataaagaatgcggaatctttttgctgtttcgcccaagctaaggctttagtgacaatcttcaccgggttctgcgcttctgcccggaaaggagtaggttctaaatattgtcctctcgctttattattcagaaaatatgcaaagtccttatcttcctgcgtatcacgctgattctttccccaatgaaaatattcctcacaataatcaaaatctttcccttttacatgcgcatggttcttacctactaacgcagttttatatccttgttccttaaacacttcaagcatatctttcttataatacatatcaggagtattatgattagtacggacatgcgtagcagtcggataacgtcctgtaaacatggaacaacgcgcaggcatactagcaggagctaccgtatacgccttatcaaaccag

SEQ ID NO: 8347 - DNA, 6862 bp, Unknown
  gut microbiota DNA sequence
ttgcccgaacgctgcttttattcaaacaaagaactatatttgcaaaaaaaccgactaacaattctgatacttatgaaaattttatctatccatgatttggcaacaatcaggaagagagcagagcacaatctttcattgcgcgaagaaagtaatgaaaaggtgactgaaaagtgttacggactggcatccggtgcgcaacatcttcagattctgatctgcggtggtacaggctgtaaggcatcttccagccagggtattacagacaatcttctaaaagccatccaaaagaacgaaatcaccgacaaagtagaagtcatcaccgtaggctgtttcggcttctgtgaaaaaggtcctatcgtgaaaattatccccgataataccttttacacccaagtcactcccgaagatgcggaagaaatcatcaacgagcatatcatcggaggacgaagaatcgaacggttgctgtatgtagatcctaaaacggaacataccgtcagcgactccaaacacatggatttctaccggaaacaactccgcatcgcattgcgtaactgtggttttatcgatcccgaaaatattgaagagtatatcgcccgtgaaggatactttgcattggccgattgcctgcttaacaaacagccgacggacgttattgatattatcaaacgttcgggacttcgcggacgtggcggtggcggtttcccgacgggactgaaatgggaatttgccaacaaacaacagtcagatgtcaaatacgtagtttgtaacgccgacgaaggagatcccggtgcattcatggaccgttccattatggagggcgacccacactcgattgtagaagcgatgtgtgtctgcggttattccatcgggtccaccaaaggattagtatatatccgtgccgaatatccgttagctatcaaccgactgaaaacagctatcaatcaggcacgcgaatacggattactgggagatcatatcttaggaacagatttcagtttcgacatagaaatacgatacggagccggagcttttgtctgcggagaagaaactgcccttattcattcgatggaaggaaaacgaggagagccgactctgaaacctcccttccctgccgaatccggttatctgggaaaaccaaccaatgtaaataatgtggaaacacttgccaatattcccattattctaaccaaaggagccgactggtttgcaacgattggcacagaacgttccaaaggaaccaaagtgtttgctcttgccggaaagattaataatgtagggctgatcgaagtgccaatgggaactactcttcgggaagtaatctacgaaatcggaggaggcatcaaaggcggaaagaaattcaaagctgtacaaacaggaggaccgtcaggcggctgtctgacagaaaaacatctggacactcccattgactttgacaaccttctctcggccggttccatgatgggttcaggagggatgattgtcatggatgaggacgactgcatggtatccgtagcccgcttttatctggattttacagtggaagagtcctgtgggaaatgcacaccttgccgcattggaaacaaacgtctgctggaactactgaacaagattacggaaggaaaaggcacagaaaaagacctggacacacttgccactttgggacaagtcatcaaagatacggccctctgcggactgggacaaacctctccgaatcctgttttatccacattggataacttctacgatgaatatatggaacacgtgcgggataagacttgtcgttccaagcaatgtaaatcactattaacgtataccatcagtccggaacgttgcattggttgtcatctatgcgccaaaaactgtccggcggatgctatcagcgggctggtgcgcaagccacatgtcatagctcccgataaatgtatcaaatgcggcatgtgtatggcacgctgcaaattcaacgctattcttgtctgctaaaatcgattactatggaagataaacaaatcaccctccagatagacggtcatttcatcaccgtccccgaaggaagtaccatccttgaagctgccacgaaaatcggcatcaacatacctactttgtgtcacatcgacctgaaaggcacctgcataaagaacaatcctgcttcctgtcgcatctgcgtggtcgaggttataggacgccgcaatctggctcctgcctgcgctacccgttgcacggaaggaatggtagtgaaaaccagtacgctacgtgtgatgaacgcacgcaaagtggtagccgaacttatcctgtcggatcatcccaacgactgtctcacctgccccaaatgtggcaattgcgaacttcagacattagcgctacgctttaatatccgcgaaatgcctttcaatggaggcgagctctctccccgcaagcgggaaatcactgcctccatcgtgcgcaacatggataaatgtattttctgtcgccgctgcgaaagtgtctgtaacgatgttcagacagtcggtgcgctcggtgccatccgtcgcggattcaacacgacgatagcccctgccttcgaccggatgatgacggaaagcgaatgtacctattgcggacaatgcgtagctgtctgtccggtgggtgcactgaccgaacgcgattatacgaaccgcctgctcgacgacttagctaacccggataaagtggtgattgtgcaaacagcccctgccgtacgtgctgccctgggcgaagaattcggttttcctcccggcacactggtaaccggaaaaatggtttatgccctgcgtgaactgggattcgactatgtattcgatactgactttgccgccgacctcaccatcatggaagaaggatcggaaatactaaaccgtctgacgcgctatctcaacggagataagtccgtacggttacctatcctgacctcctgctgtccggcatgggtgaacttcttcgaacatcacttcccggatatgctggacattccatccaccgcccgttcaccgcaacagatgttcggctctatcgccaaatcctattgggcggaaaagatgggaattcccagagaaaagctggtagtcgtatccatcatgccctgtctggcaaagaagtacgagtgtgcccgcgatgaatttaaagtgaacggtattcccgacgtagattattctatttccacccgcgaactggcacgactgattaaacgcgccaatatcggcttcccgctggtactggacagcccgtttgacaaccctatgggtgagtcgaccggtgccggcgttattttcggtacaacaggtggtgtaatggaagccgccctccgttctgtttatgaaatctataccggagaatctctgaaaaatgtaaacttcgaacaagtacgcggacttaacggtgtccggcgtgctaccatcaacctaaacggatttgaattaaaagtaggcatcgcacacggactaggcaacgcccgccatctattggaagacatacggaacgggcacaacgaatatcatgtaatcgaaattatggcttgccccggaggttgcatcggaggaggcggacagccgttgcatcacggcaactcggaaatattgtatgcacgcgccaacgcactctaccgcgaagacgccaacaagcctttgcgcaaatcgcacgagaatccgtacatcaagaccttgtacgaagaatatctcggcaaaccactgggcgagatatcggaaacgctattgcacacgcactatttcaacaaatctatggattaactttaaacgaagagtattatgtcagatataaaactagcctgcgatgtggcagaacaagtccgaacgatttgcgacaagcacggaaacaacccgggcgaactaatcaatattttgcacgaagcgcaacacctgcacggctacctgcccgaagagatgcaacgcatcatcgcttccaaactcaatatccccgtatcgaaagtatatggagtggtcaccttctataccttcttcaccatgaccccgaaagggaaacatcccatctccgtctgcatgggtacggcatgttacgtgcgcggctccgagaagttgctcgaagaattcaaacgcgtactaggcatcgaagtcggcgaaactacaccggatggaaaattctcattggactgcctgcgctgcgtaggtgcctgcggactggctccggtagtgatgattggcgagaaagtgtacggaagattgcaaccgatagatgtgaagaagattatcgaggagttggaataaatgtccggaataaaaagtggctgctttgaaaaatcaaggcagccgctttcaaacatttttttaacaacaaacaaaaaagcggagagaacgagattcgaactcgtgatacacttttggcgtatacacgctttccaggcgtgcctcttcaaccactcgagcacctctccttattttccaataaggaaacagacaatggaaatatattttccacaaaagaaatagcagcttaaaagctgctattcttagcggagagacagggattcgaaccccgggtacctcgcagtacaacggttttcaagaccgccgcaatcgaccactctgccacctctccaaaacttccttttcagaagtgcttttcgttaaaagcggtgcaaaggtacgaatatattttaaacttacaagagttttcacaaaaaaaatcacgaacatcatttccaaagaatagcaatatctaggtattttatgttgaaaagcataaaatacagcatatttatgctgattatatgaaaaaacgttgtaactttgtgcgctctaaagaaaaggataactacaacctctaattttatcatttatggaattaaataagatctttaaagacggtctttggagcacagaaatcaacgtaagagatttcgttagtcacaacatcactccgtattatggagatgcttctttcctcgaaggacctaccgaacgcactaaagctgtatggaaccgctgcctcgaagcactggcagaagaaagagccaataacggagtacgctcactggataatgtcaccgtctcaaccatcacttctcataaagccggatatatcgacaaagaaaacgaactgatcgtcggtctgcaaacagacgaacttctgaaacgtgcaatcaaacctttcggaggtatcaacgtggtgagcaaagcctgccatgaaaacggcgtggaagtggacgaccgtgtaaaagatatattcactcactaccgcaagacgcacaatgacggagtatttgacgtatataccgaagaaatccgttcgttccgttctctgggattcctcaccggacttcctgacaactatgcccgcggacgtatcatcggcgactaccgccgtatggctctctatggtatcgaccgactgattgaggcaaaaaaagaagatttgcgtaaccttaccggtccgatgaccgaagcccgcatccgcctgcgcgaagaagtggcagagcaaatcaaggcattgaaggacatgaaggtaatgggcgaatactacggactcgacttgagccgtcctgcctacaccgcacaagaagcagtacaatgggtgtacatggcttaccttgctgccgtaaaagaacaagacggtgctgccatgtcactgggtaacgtctcttcgttcctcgacatttatatggaatatgaattgagcaaaggaaccatcacagaatctttcgcacaggagctgatcgaccagtttgtcatcaaactgcgtatggtgcgccacctgcgtatgcaatcttacaacgacatctttgccggcgacccgacatgggtaaccgaatctctgggcggacgcctcaacgacggacgtaccaaggtgacaaagacttctttccgcttcctgcaaacactctacaacctcggcccttcaccggaaccgaacctgactgtattgtggagcccggaactgccggaaggattcaaagaattctgcgcaaaagtatctatcgacacttcttccatccaatatgaaaacgacgacctgatgcgtgaagtgcgccagtctgacgactacggaatcgcgtgctgcgtatcttatcaggaaatcggaaaacaaatccaattcttcggcgcacgttgcaacctggcaaaagccctgctgcttgccatcaacggcggacgttgcgaaaacaccggtacggtaatggtgaaaaatatccccgtactaaccagcgacacactgaacttcgaagaagtaatgagcaactacaagaaggtattgacagaaatcgcccgtgtttacaacgaagcgatgaacatcatccattatatgcatgataagtattactacgaaaaagcccaaatggctcttgtagataccaacccgcgcatcaaccttgcttacggtgtagccggactttctatcgccctcgattcactgtcggccatcaaatatgccaaagtgactgcacgccgcaatgacatcggtctgacagaaggtttcgatattcaaggcgaattcccttgcttcggtaatgacaacgacaaggtagaccacctgggtgttgacctagtctatttcttcagcgaagaattgaagaaacttccggtttacaaaaatgcccgtcctactctgtctttgctcaccatcacttccaacgtgatgtatggcaagaaaacaggtgctactcccgacggacgcgccaaaggtgtcgcttttgctccgggagccaacccgatgcacggacgtgacaagaacggtgctatcgcctctttgagttccgtagcgaaattacgttaccgcgactcacaagacggtatcagcaacaccttctccatcgttccgaaatcactgggagctactgaagaggatcgcgtagaaaatctggtgacaatgatggatggtt

SEQ ID NO: 8348 - DNA, 3063 bp, Unknown
  gut microbiota DNA sequence
gggtaatacttaatacttgatacttaatatttaacaaatacttgtttatgattaactcgaagatgatattccggattctgggttttctgcttctgatagaaacagttatgctattatgttgtggaggtgtttctcttttttataaggagaatgacttgcagagttttctggtttcatcggctattacaactagcatcggtattctgttgctcgccatcgggaaagacgcagtgaaatccctgaatcgccgtgatggatatgtcatagttagtgtagcatgggtcaccttttctcttttcggaatgttaccttattatataggagggtatatcccaagtgttacggatgcattttttgaaacgatgtccgggttcagcagtacgggtgccaccatcttgaataatatagagtcaatgcctcatggaatacttttttggcgggctatgacacaatggataggcggtttgggtattgtattcttcaccattgccgttctaccgattttcggtgtgggtgggattcaggtgtttgcagcagaagccagcggtcctactcatgacaaagtgcatccccgtattggtatcactgccaaatggatttggggtatttatgccggaatgacaggaacattgattgtcttattagtatttggaggtatgagtgtgtttgacagtatatgccatgctttcacgacaaccagtactggcggattttctaccaaacaagcaagtatcgaatattatcactcaccctatatagattatgtaatctctattttcatgtttctttcgggcatcaacttcacgctattactgttgatgttcaatggaaaaataaagaagttcattcatgatgcagagctaaaattctatttctggtgtgtctctttctttactatatttattgcagtctggcttcatcagacttcttctatggagatagaagaagcgttccgtaaatctcttttccaagtgatttccttgcaaacttctacgggatttgccacagccgattatatgctttggccttctatcctttggggatgccttctaatagtgatgataatcggagcctgtgccggcagtacaacaggaggtataaaatgtattcgtatggttatcctgtttcaggttgtgaaaaacgaattcaaacatattcttcaccctaatgccgtgctcccggtgcgagttaacaaacaggttatttctccttccatccagtctacagtattggcctttacttttttatatgcagtcatcgctatcatcagcatacttatcatgatggggctgggagtcggttttctggaatcaatcggaaccgtaatctcaagtatgggtaatatgggaccgggactcggcacatgcggcccggccttctcatggagtgaattgcctgatgccgccaaatggctgctttcttttttaatgctcttgggacgtttggaattgtttacagtattactacttttcacttccgatttctggaaaaagaattaagaattcaataaaggtagtctctttaatgcaaaagctacaataaggagtacattatcaggctattacaaagagtacttatctattcatatattctcaacgatactcactgttatgagaaaaaatactcatcgcaatgagaaaaagttctcattacagtgagaattctttctcattacggtgagtattctatcgtatttgtacgttgttatcacatcatatctttctaagtaaaatctttcttacaacaggcttatttatttcataaatcttattgataagaacatccatttcctgttggcgagcatcacggacagcttcaaacatcatctttgaatacatatcacgacgtcccttcaaccaaacgtttttatccaagttttcatccatcacctcgatcgcttttctgtcgtcagcatacaacaatcccttttgctggaaaaagccgaattcacaccacgcatattctctgaatgttctttcaatttcccaacgatattcattcaggtgcatcaccgtcaatgcttgttggtattggggagttttggattcagcagcaagattaatgccctttgccagttcatctccactccaggttccaatttcttcatcgtctatcaacaacttataattgcctttcagtcctgttactttcaacgtttcacggttcatctcttccataaaaggaacaactttcagcacttctgcctggctctttttctgtccccaaccacgagcaatagtatctaaaggataaggaagagcttctgccaaatagtcaaaactcaaatcttttccgttcttctttatatttgaaacggtacaattttccgacttaacggcttgttttttattagcattaatctccatatccgctacttctttacctacaaatccctgggctttcaggaaaagataggccatcaccatgtgcccgtcgttatcgggatgaatacggtcactgccacaaagggtaaaggtaggatctttctgctgatattgctgattaatagctgtcataggagcatttaaatcggtaaattcccaattattcttaactgccgattctttctgatattcaacaagccgtttgatggtttcattttttgtcttgaacggtgtattctctttcagttgtacggtttcatcatacggagaagttccgaccatcacgatacgggtatcaggaagatctttaaaacgtttctccatctgctggtaattctttatactttcctgatatttctgctcaccgaattctttgggcttatcaccgttatattcaaaatatccggaatcattcataccaaaagtaaccatcaacacggaaggtttcatcgcaaaaatatcaccatccaggcgtttgttcatatcataggccgtgtctccaccaataccaccgttgaaaacacggataggcatatccggaaaacgggtcatatagtacaaccagatgtatgaatggtaatgaccaccatccgttatactatttcccaggaacactgctctctcaccctccttaaaaggtttcacagtttgtgcaaacgcagcagtacatgtcatacaa

SEQ ID NO: 8349 - DNA, 3990 bp, Unknown
  gut microbiota DNA sequence
tatctgaatacctgactttaataaaagaaagcaaaaaggtatgccccattcctatcattgccagcatcaactgctacactgattccgaatggatcgattttgcaaagaagattgaagaggctggtgccgacgcattggaaatcaatatcctcgccttgcaatcagaactgcaatatacatacggttcattcgaacaacgccacatcgacattctccgccgcatcaagcagacggttaacattcccgttatcatgaagctgggtgataacctgaccaatcctgtggtattaatcgatcagttgtatgccaacggtgcagccgcggttgttctcttcaaccgcttctatcagccggacatcaacatcgaaaagatggagcatatttcaggagaaatattcagcaatgcttccgacctcgccaatccgctccgctggattggaattgcatctgcagtagtagataagatcgactatgcagcttccggtggtgttgccaatgctgaatcagtagtgaaagcgatccttgccggtgcttcagccgcagaagtatgcagcgcagtctatctgaatacaaacgcatttattggagaagccaaccgcttcctctctgcatggatggaacgcaaaggattcgaaaatatagctcaattcaaaggcaaactgaatatcaaagatattaaaggcgtcaatacatttgaacgtacacaattccttaaatatttcggaaagaaagaataaaacaaatgaagaataaaaaatgaagaatgaagaatttactatgcagcataatagcgcagcttattctttattcttcattcttcatttttcattcttcatttcctacagcaggttacttgccagttcactcaattcacttcgttcacctttcagcaaattgacgtgtgcaaagatattctggtctttcatacgatcaatcatatataccaagccattggactgactatccagataaggttggtcaatctgctggatatctcccgtaaataccatcttcgtaccttcgcctgcacgggtgatgattgtctttatttcatttggggtcagattctgcgcttcgtcaatgatgcaatacatttcgctcaaactacgaccacggataaaggccaaagcttcaatcaccagctgttcgcttttctgcatatcttctatgcgcttcacttcggtagagttcgtagcaaactgacgttttatgacgttcaggttatcaaacaacggctgcatataaggagccactttttcctgtgcgtctcccggaaggaaaccgatatccttattagaaagcgctacaacaggacgtgccagcaaaatctgtttgtaatcggtcagtttacccaacgcagcagccaaagccagcaaagtcttacctgttcctgcttttcctgtcagagctaccagtttgatattcggatcattcaggatctcaaaagcaaaactctgttccgcattccggggttcgattccataattcttacccttcatcacgcggataatagaatgggtaaaaggattatagcgtgccaatacactattccggtcactcttcaacacaaaacactcattgggatgaaccaaatctttaaagtcgaattcactcaagtcaataccttctttggaagaataaatgcggtcgatcaatgcaggatctacattttcgaaaatctcattcgacttctcgaatacatctacattgaccaccttatccgtaatataatcttcgcaaagcagaccgattgaacgagctttcatgcgcagattcacatccttggttactaagatagatttcacattcggatacttatcggccaggtattcggttgctgccaaaatcagatggtcgggtttctttataggaaacgattcccacactttggtagccggcacattgctcgtcaccacaaacagacgtcccaatccttcgccaagcttcactccttcggagaaaagctcgtcgctagtcaatacatccaattcgcgcacaaactcacgagcattgaagttaatctgctcgtttccttttttgaacttatccagttcttcgagtacaacaagagggaggtaaatatcattttcctgaaaattcttcaagcaattgtagtcgtgaagaataacatttgtgtctaacacaaaatttttcttagttcccatgatttcttagatttaaatgttgatatttgcaatctcattcgccaatccctgcatttacggttagattgacggttctaaagataaacaaattagcgggcaataaagattgcccgaagttaaatattataaaacatggactatcagaacactttaaagtacttatatgagagtgcgccaatgtttcaacaaataggaagcaaagcatataagccaggtttagagactactcatcgattagacgaacatttcgggcatccccatcaacaattcaaaacgatacatatcgccggaaccaatggaaagggttcctgctcacatactatcgcagccgtattacagtccgcagggtaccgggtaggcttattcacttccccccatttggtcgacttccgcgaacgcatccgcatcaacggagaaatgatgccggaagaatatgtagtcaactttgtagaagaacaccgctcattcttcgaaccactccatccttcgttttttgaactgactaccgccatggcgttccgctactttgcggaccagaaagtagacgtagccgttatcgaagtaggaatgggcggacgtttggattgcaccaacatcattcaccccgatttatgtgtcatcactaatatcagttttgaccacatgcaatatctagggaataccctgacaaaaatagccaaagaaaaagcaggcattatcaaagaaggggttccggtagtcatcggcagagctaaaggcagcgttaaacgtgtgttcaccatgaaagcaaaagaaatgaatgcacctatcaactatgcagattctatcttcccatataatcccacagactggcttccttatccggaaatgcaggcactaagaaaacgtctggataatgtcctgcaagacttgataaaagagactcaccaaccatctgaaagcgcacaagaatccaaagagatattgcttttcctgcatccggcagacagcattaaagcattagacaaaatactcgacaagagaaaagatgctatccgaattgtcaatgaaatgtttcctgcaggtctttttatggaattaagcggtctctgccagcatgaaaatatcctcaccatcctgtctgctcttgaagagctgacaaaaataggttatcgcatctgtcccaaagactatctcaatggttttgctgatgtgtgcaaactcaccgggctgatgggacgctggcagaaagtacacagctatccggatatcatctgcgacacgggacataatgtagatggaatcaaatatgtctgtggacatcttgatttccttcatcagaaattcaaccaggagctgcacatcgtatttggcatggtgaacgataaagatatcagcagtgtcttgcaagagttaccgaaagatgccacctattatttcaccaaagcaagtgtgaaacgtgcacttccggaaaatgaactattggcattggcagaagaagccggattgaaaggtaccacctaccccactgttgtagaagctgtacaggcggcaaaaaagaactgccccccaaaagatctgatctttgtaggaggcagcagtttcattgtcgcagatttgttagcgaaccgcgatacactcaatctctactaacgcatccttgggcagagcttttacggcaaccgccgaacgtgccggaaaagctccgtcaaaatacgtggcatacacgccattcatccctgcaaacagggacatatcctgaagaaatactgtggttttgacaatgtttcccattgtcaatcctgcttcttcaagaatgtgtttgatattctccaacgactggcgagcctgtccttctatcccttca

SEQ ID NO: 8350 - DNA, 2477 bp, Unknown
  gut microbiota DNA sequence
acgagtatatttcatagactaatctttatttgctgactttttctgcttccaagattgcttggtaagcattaacgatacctccggaaatacataggtcatcaaaaaggaataaatcttgtgaagggctatcgttcacgcggattcctttttctacttctacacctttgcgtgaagtgacgctttttaataatatgtcacggatttgagagccggtcagtttagggaaataagacttcacaagagcagctacgccagctacagtagccgaagccattccttctccagttcctttttgataagtgtcacccatataagatgaataaatgtctgttcccggagcataaatatcgagagcagttgcaccgtaattggtgttcaataccggatttccattcttgtctgaagaagcaactaccataaaattagtaagttctccctctttattcatcttacgattgggaaagaattcgtctttatccatatccattgatagatcccaaaccggaactataactaatgcccctttcttctctgcctctttcaatgcttctgacacccattgtttctgctcttccggatatatggagttttgttccggtaatacgattacatctgcaccgtggtttactgcatagcggatggccaatgccatatctttcaggtacggttctccttctcccgggtggatgcgtaaggtcatgatttctgcattgtctgcaataccgttacttccgataccgttgtcacgtttagctgcgataacgccggccttcattacgcctgttgccgcatcagatgtcaacagtacattattaccataatgcgtatcgttaatatccagaggattatcacctacaatttcttttcgattatcacttccgtatctctttaaagcctcttcataagacgctttacctgtttctacacttttctttcccatattctgataaacaggttcccatttatccgtattatagatgctgaaatagtaggcagtaaatacaaaagcgacttcagaaagactgtctctttcagctttgggatcataacaactttggaagtcctcaacagtcaactcttttccgggaaaacgttttttcatgtccttatcgaacttttcaacatattcttctataacataagatagttgaagaccgccgtaagctccaccgattcttgattccggcatgactttatagcgatagtaattatattcttctatgttttccggtgcggggacttcttggcgttttccattgactattttataatacttttttccgtcaaagatataatcagcgtatttatctttgagacggaagaattcacgttctccttcgcgtgtcaaagcttccattatttggccgtctttaccaccgatgaagttccagccattgatgtcgtcaacaaacccgtttttatcatcatctttctggtttgacttttcttttgggttgatccagattgcgtgtttcaggtcttcgtgttctacgtccattccggttccgatcagtgcaacaaccggtcttttctttgctttctttttgttggctttcaagtaatcataagctttgtttacttcagctccgtatacactgtcctggttgaaagaacagttaaaccagtccagttcggattgttttttttgtgtttctgcctttggtttgattaactgggctgatacagtaacgctgatgaaacagcatacgattggaaatataagtttcttcattgtcaaaagagttataatttatatagtttgtttattgtcttatttttaaaatggcttcgcgtacttgttcaccccgaacgttgcgtgcagcaagtttgccttctttgtcaatgactacaaggaaagggatggagtagaagccgtaagcagtctggatagcacttggagtcttgctgtttttagggaatcctgccttatcccatagcatcacccacggcaatttttcttcatccagcatttttctccattttgcttcgctgtcatccagcgagacactgatgaattccagatcgtcagccttcaattcattgtatatggttagcatactacgcatctctttacgacaaggaccacaccaggaggcacagaagtcaagtacgacaattttcccacggaagtctttcagacttacgttttttccgttggcatctgtgaaagtaaagtcgggacattctgcaccaatgatttggtgggagaggatttctaccctgtttaccagccatttggcagataaagactttctgtcttgttccggtatcatgtccaatagcattttgttggattggtaatcatttacatctgccagataggctaatgcagatgccatggagggagttagttttcctttgacggaagtggaaatcgttgctatatccgggtctttttctgctggcatatagttttgtaaagtcagaaacggatcgatgccagtgaatgaaagcgaactttgttcagggttcttttc

SEQ ID NO: 8351 - DNA, 929 bp, Unknown
  gut microbiota DNA sequence
tcagtatgctaacgctactttgttgcgttacatggcacagggtgctgtagaatatgctaaagaattaggctgcgcacatccggaaatcgttcttcatcttgaccacggagatacattcgaaacttgcaaatcttgtatcgattcaggtttctcttcagtgatgattgacggttctcatcttccttacgaagaaaacgtagcattgactaagaaagttgttgaatacgctcaccagtttgacgtaactgtagaaggtgaacttggcgtattggctggtgtagaagatgaagtttcttccgaccatcacacatatactgaccctgaagaagtaatcgacttcgctactcgcactggttgcgactctttggctatctcaatcggtacttctcacggtgcttacaaatttactccggaacaatgccacatcgacccgaagactggccgtatggttcctcctccattggctttcgaagtattggacgctgtaatggaaaaacttccgggattccctatcgttcttcacggatcatcttcagttccggaagaagaagtggaaactatcaacaaatatggtggtgcactgaaagctgctatcggtattccggaagaagaattgcgtaaagctgctaagtctgctgtttgcaaaatcaacatcgactctgactctcgtctggctatgactgctgctgtacgtaaggtattcgctgaaaaaccggctgaattcgacccacgtaagtatcttggcccggctcgtgacaacatggaaaaactgtacaagcacaaaatcatcaacgtgctcggttctgacaataaattggcacagtaataatctccggattattccataaataaaagaaagaggctgctccggtttgaacactggtagcagccttttttgtctctttacagttctatccctatttatcttt

SEQ ID NO: 8352 - DNA, 1320 bp, Unknown
  gut microbiota DNA sequence
caaaatgaatcgaatttttcatgcccgcatcgcctggtaccaatatttcctgttggtggtgcttactgtgaatgccgtcggcgcattgtggtgtaagtatatcttagtggcggtactgtttatgttgatgctgattgtagtgatcgaacaaattatacacactacttatacattgacaacaaacggtgatctggaagtctcacgtggtcgttttattcgcaagaagatcatcccgctttccgaaattaccgcagtcaggaaataccattccatgaaattcggccgcttctcggtgacggattatatcctgatagaatacggaaaagggaagtttgtttcggtgatgcctgtcaaggaacaggaatttgcagaactactcgaaaagagaatgttcgcaaagaaaataaaggccacagaggtaatagactctgtagactctcaagcggatgaatcgtagcatgttttgataataatgaaaagattaactgattatatactatgaaatatcaagtaattatcattggtggcggtcctgcgggatatacggctgccgaaactgccggtaaaggcggtttgagcgtattgcttatcgaaaagaatagtctgggtggtgtctgtctgaatgaaggctgtattcctacgaaaacattgttgtattcggcaaagacttatgacagtgcaaaacatgcatcaaagtatgcagtcaatatcccggaagtctctttcgatttgcctaagataatagcgcgtaaaagtaaggtagtgcgtaaactggtgctgggagtgaaagcgaagctgactgccaacaatgttacaattgtatcaggagaagcgcagatcattgataaaaatacggttcgctgcggggaagagacttacgaaggagagaatctgatattatgtacgggttcggaaacctttattccccctattccgggagtggacgcggtgaactactggacgcacagggatgctttggacagtaaagaattgccggcttctttggctattgttggtggcggggtaatcggtatggagtttgcgtcgttcttcaatagtttgggagtacaggtgacggtggttgagatgatggacgaaatcctgggtggaatggataaggagctttccgctttgcttcgtgcggaatatgccaaacgaggtattaaattcctgcttagtacgaaagtggtcggcttgtcgcaaacggaagaaggggctgttgtttcttatgagaacgcggagggaaacggcagtgtcattgcagaaaagctgttgatgagtgtcggccgtcgcccggtgacgaaaggtttcgggctcgaa

SEQ ID NO: 8353 - DNA, 2053 bp, Unknown
  gut microbiota DNA sequence
gaaacagagtttaactaccttcgccaactatttcaatttaatgctataccgcactacgaacttgttgaaaaagatggcagtatatcaaaagaaggtttaagcagccacagtatcaggaaatatctggataatcattttgaagtaaaaggtgaatagtatcaggacctctaaataacggatgccaatataaggtcacccataaaagaatatcaaaaaaagcaatgcaaagcacggaaaccatctcatttttccgtacctttgcatcgcttttaaattaaaatcatagaaatatggacgattcaaacccgcgaacgtgcacaactagtattaattaaagcgaacagagccattgaagaccgatgcctctgctcgtgtcaaacaaacgaaaggaggcaataagatgagaacgtatctttattgtgaggctggctttgtggaaaaagcacaatggcttcccaacagctgggtaaatgtagtatgcccaaacaatgatgactttgaatttctaactcaaactctcaacgtacccgaatcatttctgaatgatatagccgacacggacgaacgtccgcgtacagatacggaaggcaactggttgttgacgattctccgtatcccggtagtgaacaaacagaatggcagtctgcctttcgacactgtaccgattggaattattaccaataacgagattattgtgtccgtctgttatcacaacacggatttgttaccggatttcatagagcatacccgtcgaaaagggatcgttgtacgcaacaagctagatctgattttccggttaatctattcttctgctgtgtggttcctgaaatatctaaagcagataaacatagacatcagtgccgcagaaaaggaactggaacgaagcatccgtaacgaggacctgcttcgtctgatgagactgcagaaaacacttgtctacttcaacacttccatccgtggaaatgaagtgatgatcggtaagttaaggactatttttcaggatacggattatctggacactgaattagtggaagatgtaattatcgagctgaaacaggcgctcaatacggtgaatatttacagtgatatcctcacagggacaatggatgcttttgcgtctattatctccaataatgtgaatacgatcatgaaacgtatgacaagtctgtccatcgtcctgatgcttccgacattgattgccagtttctatggcatgaatgtggacattcacctggaagaagtgccctttgctttctctttgattgtgctcttttccatcggattgtcaacgcttgcgtttgtgatattccggaagattaagtggttctaaaaggaggaacacaaaaaaacagcttaccatctatgatcctttataaggattctttatgacggtaagctgtaattatacgttttttattctatagagaattaattaaaagagaatgtttagagagagaaattaaaatattttatccttctttatttgcttttcttccacccaacggaatagataccccaacgaatccattaacagagttagagttctttcctaagaacatatagtcagttccgacaaacagaggacctaatttcagacccaaaccgaaagatttaccagctgactggatagctgaatagctaagcgctacattgaaccagcttttcggacggtagtttgcggagaatgttaattctgtaagagcatcaggctgtacaaaacgagttgttgacaatacaccgactgctaatttgttattaaagaatccgtattctgcacctaatacaagagtagaagcaagacgagatttacgagattctttagcatctcctacttcaagttgcaacatatcatagttaagcacatcaccttgtgtcacaagatccatgtaattttcagcatcgttttgcaactgattcaatgcatttgtaacactagattgtgcattggccggatcaatcatgcctgcataagtacttcctttaatatcaattggatccggattagctgatgctatctttgtacttgatttagaccaagaaataaagcctaaat

SEQ ID NO: 8354 - DNA, 1320 bp, Unknown
  gut microbiota DNA sequence
cggattgtttatatcaatggagatgtttcttttattcttttttcgcgtgccatacttatcgttttttaggaataaaaataccgcccagtgttggtttggcgccaaatttccctgcattatatgcattgagaaacgaaacgccattgcggatattgaagtcatcaagtgaaaacaggtctgttgaaccatcatcctttttttctgtaaaccagactacatctttacgtaaatcctcggtgtctaatgattggagattatgcgtactgaaaatcagctgcgaataagtcgaattaaccaaaaataagttgatgaaatgggcaaataaatccggatgcagcgaattctcaagttcatcaacaggtatgatagcatttctttcaagcaatatattcagaatagttcccaaaccataatagcgcactgttcctgctgattcaagtatatcaggcaggtaatgaacagaagatgttccattggctacaatcgtatgttcaaatatcaaatccgtatcttttttatttttctcattttgttgaacatcaaaaccggatatattaaaatctgcacggtgcagtaaatctaataaaaaggatttattctccttctctgcttccatttctcctgttgtccatgttttcaaatccgttttgggcaagagtataggtaaccactgcttcaagaaatagttatagacacgttctaattcaggaaacataaagttagctgtagcataagctgaaacaacactcatattactaagcgtatttacctgcaacttttcctgctcggccacattgagtttgactttgcttcctaatcggatatgagtgattccattaatggtctctcgggagaaaatttcggctggttgcttaccgggataatatttaagtgtttcttttaggacagcactattatctacttcaagataatagagatgcttcatattgtttacaaaaaaagtcaattcaaatactccacattctttctttgtcgtatcatccaagagaaacggagtaaacccgataggctgcatcttgtttatcttaggagaaatggctatttttcgtatgaagtcaagtgctagcaacacgttagtctttcctgaagcattagctccatagaggataccgagttttaatactttcgtatcgttgatagtggtacagtaatattcttctgaaaccttatctgcagaggcttcaaaacttaatatctgccaatccttagctgatctgaaatttctaaatttaaactctaaaatcatactccaatatattaaaaatgcgactattttgcaaatatagcattttaagctat

SEQ ID NO: 8355 - DNA, 5880 bp, Unknown
  gut microbiota DNA sequence
caatagacgaccttcacaggcggtatttcatatataactcaactaattataactcaaattcatttttaacgtaaattctctccctgtattcagacggagtcataccggtatgttcacgaaagaatcttgtcataacagagttcgactggaagttcgtgcgtgaggccacttcttttatttcaaggtcagaatcccgtaaaagagcctttatttcaagaagggagtaatctataatccagtcttttgccgaacgaccgctcatatctgtaattaccattgtaagatgcttggcggacacacacatctttttcgcataaaacgcaacatcccgacttacggtatgaaattcgatcaccaaacaaaaaaagtcgaataaaagtttttccttacgggtgtattttactaattcggcagctttcggatttcttttataagccacatatatatcccagtagaaaacacgtaataactgcatgatagactcccgtctgaataagttgcggggtaagttgatacgaaaaatcaaaatattgcaaaagtgaatgaaacgttggcactcttcatcgtatagcggagtgctgaaatttttccgcatatagaaaaagaaatcaagcgtaggtatacatatcccgcttattgtatccataaacaggcttttgggtacttttagaaacgtcattgaaaagtcactgctaatctccgtgacagaagccagctgaaaagggaaaatgactaccagatcattggaaacaatccgtcgtttattaccaaaaacattgaataacgcacttcctcccgtgcatatcccatttatcccttcttcaagatacataggattttcatcaagaggtaaatcgtctattttagtatagacgttaaactcttctgtttccaatatattatcgaatactttatcctgcttatatggttggttcttttccatggactgctatttatcaattatgttgtttgccgttatttttatcatacggatgtcagtcgtgccatttcgattgagcaaactgtaccaccaaagatatgggaaagatgtataaaaaactttctttatctttcatcaaaatcatcagtgccaggaaatattcaccttcattaatatcaggaactgtcatataaatcttatcgtccgaatatttatggatatcgccacattctatcaacattctgtcattgacggaagagacaagatatagattggtactttcccatgtcaacatatccagattgtgaccggtgataacaatgggagcttccggtgtaatgttcccattacgcctttcatttgaaggatcatatatttctttgatgacaggaaacggcgctccttcaatcattaatatttcggcttttatcgttttcatttgattgatcagttattttgtatcttttgtaaatgaatgagcaaacttatatttctattctatggaatatcccggatgcaacggagataatactccttcttttctttatcggagtaacctgtatttagcccgtatcctgtcattttatcatcagcatataatcgcattgaccatgcatctttagaatctcctcctttctccgttgcagaccagtaataagtaagatctttgggggaaagagcgaatggttgaaaaccggttgtttcttgagtctcctccatttttttataaaaaagcaaaatcaatgcacattccccacgcgtaggtacccgccaagttccagtttcatccagaccatctttcccgcgatatgcggcacatcccctggtaactgcaaaactgggagtcgaataaacgttgctgttggcactagtaagatatccgtttgccgtagcccaatccatcgtttgtgcttttgctattccttcgctatttacaatatcaggtgaaacgagaaagtaaccggacaccttccagtcacatcctccttctttttgcctctctgtatgccgtgtcgttcggtatacaaagacatcattaccgttttcatctttttcctcttggggattatcattcgaatcgtatttatataactgaatatagctgcggaagttggtatttttgctccggtcctccaccttgtatttcaccattcctttatcattgattgccgcatatttattccctcttaaatctgtatatatttctgtcgattgagaatatacttttagtggaataaaaaacacaatacaaaattttatgactgttaatctaaatatattcatacttctttttcaatttatattgttaaattcttatggtcaatatggagtatcagaagggggaggcacatccctgacacatctatctgaaccggaggttctttctggagtcgtaagcttaccaccggaagcagttaagaaataacaataattataggatggtgttataaactctgttgtcgaggttccacccccaagccccggtagagcagccgcgcaaagccctaacaactggtttgacgcgggaagataccatttgaactcttcctcatcaattatcccattcccgttctcatctctgtttctgtcataacacgctcttgcgctaaaagtactggcagggtattgatattgatacaataacacatgtccggacgcatctttctgtggaatcgggacataagcgtcaacccaattttgattgtaagtattttccgccaaatgccgggtcgccgttttaccattatccatattgtctgttccatagagtaattctgccgttttgattctcgcatagccagttcttatagttcccggattcacatctgccaataaccgggatgtagttcgtgaagacattctagtgtatactaaccccatattgtaacttccatccccgtttctctctcctcctaaacgtccaaggtaaattgccgcccgctggtctaaacgaaatatatgtgaagtttgcaatgcctctcccgcatctccatttgtcgtggtagttactttaatatataaggatcgttttcctttcgtagcatctgcaccgggatcaggaaagttcccctctccgtcattaatatattcatcattatatagataaaacttcaattgagtagggagtatggtgctagccttgatatatgtatccaaaggttctttagcattattatacgcatctgtgtaattggaagaagaagacaggcgaagccaactctgtgtgggatgttgggtacagcttttatctgtatatacacccacttccaccatccgtccttgagtctggacaactatcggtcggacctcataagctgcatccagatcgtatttctcactagaagcgttgtatgtagcatcgaatttacctccaatgacttccgcgttataactggcgtgaaactccacatactggctgacagagtatgccctgattcgctcgtcgtttttcgccgagtttatgtccgcattaatggtggtacgcaaattataaaaatgattgggttccacatcgaagttatttgtattattatttccgatatacatttggtaaattgcatactcgccagttgccgatgtcaaggtagaatatgcccatgcctctatctgcatacccaatatgggggcactacccgatgataccccattgaccactttgtaatagcgctggttttcacttgctatgctttctaccgtcccctgacaattctgcgcaacataccacgttgccgaatagaaaccattgggatcgggggtatcaaatttatctatctcaaacgtgacataagtatccgtaccggtattcttctcgggattggtgagccgcactttgctgttgacattcagtaatttaagaccctgcaatttgtaattttccacttcgagtttataacggaacgtaatgcgtgccatcaacttctttattgcaatacctcccacaaagccggccggtttgttatattctaccaaaccatggtcacctccgtcgatgtccataacagtgatacccgacacttctccggcaagcggcacttcatcatctgcggtgataagtgattgggtatgcccttctacatttattagataatcaaagctccattttttgagttcatcaagagttctcactccactcatgtcatagtcaagtttggggcctaagactaacaggtataaggtttgattctctgctactacaagggggacatctattgtcaacatatcatttatagcagtcgccgtatcactcaacttatggggattaccattcatggaaccatcctcattaaactggaaaagccagagattgtgtaattttgtcgtgccatcggaaactctggtagttgccgcacgttgttctcgctccaatacgactgtgaaggatgaatcagagctgttttcatttctcaagaatggcttaacagtagtatattcacttgtcgatgttggttcttcgataggcggaagactgacattcaaactaaccataaccacttttcctgtagcatttcccggaccgaactcattcaggccgtcttttgtacaccctgtaaatgccagtgaaaacaaaacaatgcaaactgcccgaaaatacgtcttatcattgttttttattctcatattatatctgcttatcatcatatttttcatcctttttcttatttggtacctttctgatcaatagacagactgctaatggcaatacctactccggtctctctctctaaaacgatataaaccgtaatgccgataagactcggatttttgtttgccgggattgttattgagacaggatagctatatgtattcgatgcagtctctactttatcactgacacttatttgttcgccactgtaaacaacttgtacatacaaatttcccgcaggtatggggacatctgtaggagtaagcttgatatttagattataagtgcctccctcttgaggtaaaacgtccaaagtgcttaattcggaactggcacgtaactgatacccggcttgtgaaattgtgagtagtgtactctttgtctgtccgtccaatccgataccttccacccttaccctaaacgaacgggatgaagtactttctttgcgtttgacatatatagggatattttgggtattgctgccgtgtgtcgtatgtacggcatcatttccggattcaaacgagaaatcatcggtagttgccgttcccacatccgttcctgaagtgacaagtgtagccgtccagtaaggaatattcgaatcaataccaaaataagctgttttaccgctttccgttccctgataatcagggctgatgataatgcctactcgcatatagctttccggtatttcgttgcggacgcaacgaaccatatatccgtttcgtctgtccttatcggctcgaaggtttgcagtcaccgtcggagtacctgaaaaatcaaagaaagaggcgttgttgctccagtaacatccggtagtaccgtctccacgtgacgcaccggattcatccctgtatcggttgtgagggaataacagccaatggtacgaaaggtatccgtacgaacttacttcattatttgatgccgctataatatgattatattcttcaggtgtagccatatgccactgcccattgtctacgattcccatatccctgatttgggtttcggaaagaccggcgagtttgcatggatctcccaagccctgtttgacttgttcaggggtgttgcctgcggagatttcaccgccagccaggtaagggacattactccatcctgtaatagttaagggatcgtatgaactgggataccaaagtacatcgttcaatgcttcggcagtggtaggtggaacgaaatttgtgccatcttcagtatcagggtcactgtgcacggctatcaggctgccgtatttgaacaagacatccttatatcccgtctctgaatgatatgctttcagtat

SEQ ID NO: 8356 - DNA, 451 bp, Unknown
  gut microbiota DNA sequence
catcatgccacctccttctgcacctgcattttcgaaaatacgaggagcataataaagtaccgcattaataccgatagcctgttggaatacagaaagcaaaataccgatcacaattactgccactccataagtaaagattttctctgtcttctcgtgggcagtagctttaatatcattaagaatttcctgtgcttttgtcttaccattgatcttttcaaggatcgaataagccttttcatcctgctgtatcaatacaagataacgaggagtcttgggaacaaagaacaataacaaaccgaagaaagcggcagggaaagcttccgaaccgaacatgtaacgccatccttcataaacggtccacatatcagattcagcactaacagacagtacaccggctgcatctttcaaaataataggattttgatggtcgcccataatcaggaaattcacg

SEQ ID NO: 8357 - DNA, 2903 bp, Unknown
  gut microbiota DNA sequence
acaagctgcgaaaatcatgtatctgaatgaagaacggtttgaagtggagaaacgttttagagaatacttgtggaccgaatattcattcctgaaaaaggaaggattactgtttgcagatgataaaaaagctatcgataagctaaaagaatacttgcctaaagatggttttcttaggatgagctacgactggtatataaaagcgatgaaccccgaaatacgggaagtttggagcaattatataaagagtctcgttgaaacaatttataaaatcaataaacctgtcactcataaagtgaggctggcaagagttgaataataatagaagatgaatagaatgaaacgattgttatgtttaggtttgatttgttatttctgttgtctgtcgatgatagtatatggaaatgagaaaacttcgcctttctatttggcggaattaaaatgtgagaatcttattgatcctttggggattgataatgtaactcctcacttcagttggaagttaaagggggacggctggaaaggcgggcaaacttattatgaaatacaggtagcttcggatagtattctgttggtgcaggataaagctgatttatggaataccgggaaattgaaatccaatgcttcggttatggtaccttatcagggaaaggctttaacttctcgttctttgtgttattggcgggtacgcgtttgggatgttaaaaaacaagcttcatcatggagtcctgttgcccgttttggagttggcatcttggatcagtcacagatgaaaggagaatatataggggcttctgttgaaggtggtaagatttgtgctcctattcttcgcaagaaagtgaaattgactcagggagagacttctttcctgcatgtaaatacgttaggttatcacgaaatttatatcaatgggagaaaggttggggaggacgttctgacccctgctgtatcacatttatctaaacgttcactaattgttacttatgatattactccttatttaagagaaggagaaaatgatctgcttatttggctgggacaaggttggtataaaacgacgactttcggagcagcttatgaaggtccgctggtaaaagctgaattggatgtgttgagaaatggtaaatgggaagtcgttacgaagacagacggattatggtacggatgtgaaagtggatattcggatacaggtacttggcgtgctttgcagtttggaggtgagagggtggatggaaggattcttccgcgagatctttcaacacaggctttagacaaaatggaatggattcctgttgtgaaagtgaatgttcccgatcatatcgcttcccctcaaatgtgtgaggtaaacaagatacatcagattttgccggctgtttctgtaaagaagctggctgaaggtctctggctggtagatatgggaaaggttcagaccggatggtttgagatgcaaatgcctatattgccggcaggtcatgaagttattatggaatatagtgataatttgacgaaagacggtgaatttgacaagcaaggtgaaagtgatatttatatatctggtggtaagcaaggagaatacttcagaaataaattcaatcatcacgcttttcgatatgtgcgaatatccaatcttcctcagaaaccggaaacaggtgcaatgaaatctatgcaaatttatggagattataaacagaccgcaacttttgaatgttcggataccgacttgaatgctattcaccaaatgattcagtatacgatgaaatgtctgacttttagtggatatatggtagactgtccgcatttggaacgtgcaggatatggtggtgatggaaactcctcaacgatgtctttgcaaacgatgtacgatgtagctccaacatttgaaaactgggtgcaaacatggggagactccatgcgtgaaggaggaagtttgccgcatgttggtcctaatccgggtgccggtggcggtggtccgtattggtgcggattctttgtacaggctccctggagaacgtatgtcaactataatgatccccgcttgattgagaagtattattctcaaatgaaagagtggtttaagtatgttgataaatatacagtagatggtttgctgaaacgttggcccgataccaaataccgtgattggtatttgggtgattggctggcacccatgggagtagatgcaggtaatcaggcttcagtggatttggtaagtaactgttttatcagcgaatgcttgagcactatgtataagacagccttaacattaggaaacaaagaagaggcggaagagtttgctattcgtagagaaaaacttaacaagttgattcatcaaacgttctaccgtgcggatgaaggaatctattctaccggctcacaattggatatgtgctatcctatgttggtaggtgttgtacctgattctttgtacaataaagtgaaagagaacgtcgttgccatgaccgaagaaaaatataaaggacatattgctgttggtctagttggagtacctattttgacagaatgggctgttcggaataaacaagtggatttcttctatcaaatgatgaagaaacgtgattatcccggttatctgtatatgattgaccatggtgcgacagcgacttgggaatattggagcggagaacgaagtcgtgtgcacaattgttacaatggaattggtacttggttttatcaggctgtaggaggaatacgtcttgacgaggctaaacctggatatcgtcacttctatgtcgatcctcaaataccaaacggtgtgacctggacaaaagtaacgaaagaatcaccttatggcacaattgctgttaattgggaattgcaaggtaagcaattgaatcttcaattgatagttcctgccggaacaacggctacagtttgcatccccaata

SEQ ID NO: 8358 - DNA, 944 bp, Unknown
  gut microbiota DNA sequence
atttatgtttctccggaaaaacctacaatcttacctctttcgtgaatacttctccaaaacgattcttaaccaccactttgacagacttcgtacctttagcaggctgtgcccggaaaagatgccgtgtatgatagccggttttcttccctttcaccatgttgatgtagtcctgatcttcatcatcaaaagcctgcatggcccctttcaatactccgtcttcgtaccagtttaccgtatacgttctgtcccaatcccagatgttggctaccacatagtctttctggctttcaaattctcccggcttgtagagccggaactgataatcgggagaacagcctgtcgctttgtaacgccacttcacatcgtcacctttcacttctaccaccaggtaaccgttcggcgctccgcaacggttcacgtgtcctgcccaccatgcaccgcaggcagctccgatattatgttcataaatagtaggcgcaggttgctgattctcatagaaatgtgtgtgtcccgaaaaaatatgaacctgatacggtcttaatagttggaaaagcgcgttggcgttgcgtgcatttccaccggcagacaccgtgttgttggctaccggagcgtgtacgttcaggaatacggtgcttccttcgggcacataacttaaatcttttctcaaccagtccagatcttccggcgtgagtcgttccgtgtatttcttattaccatcgtagtcgatgtctttcattgcgattacatggatttttccaatgttgaatgaatagttggccggaccgaacgactggtaataattctgttccccatatccgtctgccggatggtccgtctgtgtcatggacttgtagagcaggttgaaatcatggtttcccattagttggaacattgtgatacctaaattagagacggcttgccggtaaggagcatataagttcatg

SEQ ID NO: 8359 - DNA, 2187 bp, Unknown
  gut microbiota DNA sequence
agcgggctttttattactgacattcaatacattacaaaagcttattatcttatgcgagtaatcagcggtatttacaaacgaagaagatttgacgtgcctcgaacatttaaagcacgccccacaacagatttcgccaaagaaaatctgtttaatgtactcaataactatatcgattttgaagaaggaataacagctcttgatttgtttgccgggacaggaagcatcagtatcgaactggtatcccgtggatgcgaccgtgttatcagcattgagaaagatcctgcacatcactcattcatctgcaaaatcatgaaagaggtgcagacagacaaatgtctgccgatacgcggagatgtattcaagtttatcaagaatggccgcgaacagttcgacttcatttttgccgatcctccctacgctttaaaagagttggaaacaatccccgaattaattttccaaaacaatcttctcaaagaaggaggattattggtactagaacacggaaaagataataacttcgaagagaatccacatttcattgagagaagggtgtatggaagcgtaaacttctcactgttcagataaaatccaactacaatctcccccccctattaaagtagcggagccaataaacgcacgatagactccgccgctttttgtctccacgaacgtctaacccaattcttcaaaaagatctgtgtactttcgcgctggtcctgaagaaatatttctttcatttcaagagcagtttctacgtcatacataaaagcattcacctcaaagttatgctcaaagctacggaaatcaacattagtagaccctacagtggaaagcatatcatcggaaaccatcagcttagaatgtagaaaacccttcttataaaaatagactttaacacctgcctgcatcacatctgccaaataagaacgcgacccaagatgagttatccagttatcggcacgctccggcaacatcaagcgtacatccactcccgataatgccgcggtttgcatagcagccaatatctgttctgtaggcaagaaataaggtgtttgcatatagaaatagctctttgcactggttatggcaactgtcaatccttgcatgatttctttccacggtccgataggctcactcgtgacgatttgcgctaaagagtttccacaagaatcaatcttcggaaaataacgggaagcagttatcaacgtgcggtctacgaaataccaatcgagcaggaaagccgtttgcaagccatgtactgccttgccttccaacatgatatgcgtatcgcgccaaataccccaggaaaaaccacgcatataacgttctgccaaattcattcccccaacgaagcccacacgtccgtcaataacgacaatctttctatggttacggtaattcaccctactggtaaataaaggaaaacgtaccttcaaaaagcttctgacttcaataccagcattgcgcatttcttcaaaaaaacggttaggtacatgccagcaacccacatcatcatagataacccgtacttcaactccgtgagaagccttttctatcagtacatccctgaccatacgtccgatggcgtcatcttcaaagatataatattccatgtggatatgctgcttcgctttttgtaattcgcgtaataatgattggagtttagtatatccttcggtatagactgctacacgattcccctcaaatggaaatgcctggttcgtctgctggaaaagctgaataagacgggagtattcataaggaacgtccgaacaatcctgtgcgagatattcggccattggtttcttcaataagcggtcgtagcttttctgcccaatgatacgttcgcgacgttgactccgcccaaagaaaaaataaaagacaagtccgacaataggaaggaaaagtaatatgagtatccatgccatggttttaaccggattccggttgtcaagaatgatgatgacaatcgtaccgataatggctccaaaataaagaatatcaaaagccactgttgctatctggctaagcatgtagttccaatcaatcataggaatctcctttcatacggatactaaacaacaaatatagagtaaattctcggattaacaaagaagtcccggcaacaacattgaatcgttgcaccgggactttcgtttcatccagattcttttattgattaaaaac

SEQ ID NO: 8360 - DNA, 4944 bp, Unknown
  gut microbiota DNA sequence
gcccagataagcctgataaagtcgtccgttgggagctacttggagaattaagtctgtgttgtccgttgcgatgcggataacgttcttttcctgggcgttcacttgtgccagggtaaacaatgccgtaagtaatacgaaaagtttcttcatggttttttaataattaattaggtattagttagtttgtgggcatataatgccacaaagataattataattcgtttggtatgaactagaatttgatgcttgcgctaaattctacggtgaatgggcgtaaatagtttccactcatataatttccggcgtattggacagcttcttctttcgtaatcagttccgaaccgttgatggttccgctggctcctttctgattcaggaagttgatgactgttgcccccagagacaggtgcttgtttacgtttcagttgattcctccgaacgtttcccagcgcccgttgaagtagagcgcttcctgaagattggcgtacgtcttgccgaaatagcggaaactaagctagaggcgtaagtctttcgtgatgttgtagcttgggtcgagttcgacaagtatctgcgggatctcttttacgatcattccgttggcattgacagacctttcctcactcgattttatccgtatcatccggctaaaacatgctgcggaattgttgcaggagggagaactgcgcaccaatgaaatttgtgacagggtagaatttcagtcaccttcttacttcgccaaagtatttcagaaacagtttaaagttacttctacggagtttgcccagcagaataagtagagaatggcatatagttagttgttattgactattattcgttatctctttgtttgaatttgaactgaaattaattcatttctatacggaaataaccccaaatactattgctggcaataactcgtcagtatgcagcttttatttctttctcttgcttatattattttttcaattgcctaaggagttttcgtttgactatagttgaacgaacgcttgacatatgttgaactatcgcttgactatagtcaaacgaaaatttgttaggcaatgaaataactattaataggtaaacgcttgcttaaaaataactaataaaatcattagtggcaattggttccaaactaggcagtttctggttaaatgggaatttaattcagacaaaagaacataagaacaaaaaatagaatagccgttcaataagcaacagaaataattttcaaagcgcagcttttatgttcttttgttcttatgtctaaaaataactaccatctgctcatttgtccaaagagacgtataaaaaataggatgattcaactctgtaaattctttcttttttacttgcttatttcgattgatttccatacttttagcctccgtaatcctttaaaaattgaccctatggacaacattcttttctggctcgttccagtcgcttccgtgttagccctctgctttgcttattactttcataagcaaatgatgaaagagagtgaaggtacaccccaaatgataaaaatagctgctgctgtacgcaaaggagctatgtcttatctaaagcaacaatacaaaatagtaggttgggtattcttggggctggttattttgttttcaattatggcttatggttttcatgtacagaatgcatgggttcccattgctttccttacaggtggattcttctccggactttccggatttctggggatgaagacggcaacatacgcgtccgctcgtaccgctaatgctgcccgtacttctctgaatgcagggttaagaattgctttccgaagtggtgccgtgatgggactggtggtcgttggcctgggactactcgatatttctttttggtatctgttgctgaatgcagtgattcctgctgatgcactgacacctactcataaactctgtgtaatcactaccaccatgctaacatttggtatgggagcttctacccaggcgctctttgcccgtgtaggcggtggtatctatacaaaggcagccgatgtcggagccgacttggtaggcaaagtagaagccggaatcccggaagatgaccctcgtaatcctgccactattgccgataatgtgggcgataatgtaggcgacgtggccggtatgggagccgatttatacgaatcttactgtggctcgattctggcaacagccgcactgggtgctgctgcttttatccattcggcagatacagtgatgcaattcaaggcagtgatcgccccgatgctgatcgcggctgttggtattatcctttctattataggtatatttgctgtccgtaccaaggagaatgcgactatgaaggacctgctcggctctttggctttcggtacgaatcttagttccgtattaattgttgctgctacattccttattctgtggtttctgcaacttgataactggatttggatttcttgtgccgtagtagtcggactattggtaggtattatcatcggacgttctacggaatattatacttcccaatcctatcgccctacccagaaactaagtgaaagcggtaagaccggacctgccaccgtaattatctccggtatcggtttaggtatgctttctacggctattccggtaattgcagtcgtgattggtatcattgcttcctatctgttggcttccgccggcgattttgccaatgtcggtatgggactgtatggaatcggtattgcggctgtcggcatgctttctactttaggtatcactctggcaacggatgcttacggaccgattgcggataatgcaggaggtaacgcagaaatgtccggcttgggtgccgaagtccgcaaacgtaccgatgcgctcgattcattggggaatacgactgctgccaccggaaaaggttttgcaatcggttccgctgcattgacaggcttggctttgctggcttcttatattgaagaaatccgaatcggccttacacggcttggtaatgtagatctgacctttgcggatggtagctccatcagtgtggcgaatgctacttttatcgacttcatggattattatgaagtacatctgatgaatccgaaagttctttcgggtatgttcctcggttccatgatggctttcctgttctgtggattgacaatgaatgccgtaggacgtgcagctgggcacatggtagatgaagtacgtcgccaattccgtgaaataaagggtattttgacaggagaagcggagccggattacgaacgttgtgttgcaatatcaacaaaaggtgcgcaacgtgaaatggttgtgccttccttaatcgctattattgcccctatccttacaggtcttattttcggtgttcccggtgtactcggtttgctgattggtggcttgagtagtggttttgtactggctatcttcatggctaatgccggcggtgcatgggataatgcaaagaaatatgtagaagaaggaaactttggaggaaaaggcggtgaagttcataaagcaaccgtagtaggagataccgtgggcgatccgtttaaagatacatccgggccgagcttgaatatcttaataaagctaatgagcatggtagccattgtaatggcaggacttactgttgcttggagtttattctaaaaaaaagcaggaaagaagtaagaaaaaggaggcaaaacaagtctccttttttaatttgaattacctttgtgtcaaaatagaagcgataaatatgttattaccttatttaaacgagaatctgattgaagccggatgtgatgaggccggtcgtggatgtttggcgggagcagtatacgctgctgcggttattcttccgaaagattttaagaatgaactgttgaatgattccaagcaactgtcggaaaagcaacgttatgcactacgtgaggtaatagagaaagaagcgatagcctgggcagttggcgtcgtgtcaccggaagaaattgatgaaataaatatcctgcgggcttctttgctagctatgcatcgtgcagtggaccaactgactacccgcccgcaacatttactaatcgacggaaaccgtttcactaaatatcccggcatcccccataccacggtagtgaaaggcgacgggaaatatctttcaatagctgcggcttctattttagccaagacatacagagatgattatatgaaccgtctccacgaagagtttccttattatgactgggatcacaataaaggctacccaactaaaaaacatcgcgccgccattgccgaacgtggaaccactccttaccatcgaatgacgttcaatctattaggagatggacagctaactttgaacttctaaagtcactttgtttcattttgcacaaacattctacatttttttgcaaaataagcacgattttgttacggataaccctaaaattgttctgtttaggctgaaaaagtgttgcctagtgcttttatttgttattgaaatactatatctttgcaaacaataataagaattaaaaagtttaaaatcatggcaacgaacaaactattgtggtcttctaaaattattggggtattttttatgatgttggtttgcactctttctgcaaatgcacagtttttacgtacttcttatttcatggaaggtacccattatcgtcaacaactaaatccggccttaacaccgacgaaaggttatttcaaccttccggtgattggtgctgttaatgcaactgtcggttctacttcattaggttatcaggatatcatcgatattattgatgatggtgacgatttctatactaaaccagattttatgaatcgtctgaaagataataataagttgaatgtgaacttcagtacggagattctctctgcaggatggtacaaaggtaagaacttctggtcattcaatatcggtctgcgtacagatatcggtgctaacttgactaagaatatgttcagtttcctgaatcaaatggaa

SEQ ID NO: 8361 - DNA, 8853 bp, Unknown
  gut microbiota DNA sequence
accggaagccgttgaccattcatatcacgacggacgataacggcaatttgtctatcagcaacgacattcagcccaaatggactgcaacttccggaaccggtatcggacttgccaaccttgccaagcgatacaggctcttgtttaaacgggatatacaaataacggaggacagagagtttacagtttgtattcctttgattgaaaaatcacaactagaacaataatcaccatgaagattgtcattatagaagacgaaaaagcagcagtacgaaacctgacttcactgcttaatgagataaaaccgaatggagaaatcgtgaccatactggatagtatcagttccactatcgaatggttcagttctcatccgatgccggaactggtattcatggatattcacctggcagatggttccgccttcgagatattcaatcatatcaatattacttgtccgattatctttacaactgcctatgatgaatatgcgttacgtgcattcaaagtaaacagcatcgactacttattaaaacccatcggtaaggaagacatagaacacgctttcgataagctccaaggtttacaagatgctgctgacaaacaccagttcccctttccacaacaggagaatgagctactgaaactgatacattcactccaaaagcaggaaaactataaaagtcatttccttattcctaccaaaggagacaaactattgcccgtttctgtagatatgatacaattgttttatattaaggactgtcaggtcaaagtagtcttaaccgatgaaaccgaatactgtttttctcaaacattagatgaacttacggagtgtctcaatccttctcttttctttcgggctaaccgccaatatcttatttcgcgagaagctattaaagatattgacttatggttcaacagccgcctgtccatcaacttgtattattcaggaatcaaagaaaaaatacttgtcagcaaagcccgagtagcagagtttaaagagtggttctctaagagaaaacgttaattccgaggcattgccttcttagaacaaatagcaaaacaaagtgtttcgtgccgtgaaacgattggtttcaacgcttgaaacaaacagtttcatgtagtaaaacactttgtttcaagccttagaaactttagtttcaagcctctgaaactgcagtttcccctaatagaaactaaagtttcccgccttgaaaccaaaggtatcccctgttgaaacttctatttacatacaagcttatatttatatgcaggcatgttcatttcaaacggtgatagatgaatgattaggtgataggtggagaacaatctatcaccgccctgaaagctcgatgaacaaagcatttcagaaggatggtgatagattgaaagatgatttccatttttacgtatggaaagttagaatatgtgccatcattcaatgacagctgcaaagccaccatttctaaccatctttatagttagctgctctccggctttcacctgggatgacttgcaacgataatccatcgcctgacgtcctgcgttgataccatcctcaaaagatgtcatttgataagagcgatctttattcaagaaatctaactttatggtaaactcacgttcctttttaccattgttagtcattcctcctataaaccacttatcgcctttccgttttgctacaatgacatattcacccgctttagcttccagtgccacagtctcgtcccacgttacgggaacttgtgtgatgaaacgggtacaatcttcattacgataataaagagtaggattatccgccaacatctgcaggccactttcaaaaaccacaaagagtgccaactgataagcgcgtgttccgatacttgcagcattgggacgttccgagcgatacacattaggctgcatactaatcatcgctccgggagtataatccatcggaccgacagcattacgcataaacggtaaatacagactattatccggataacaaccgcccatttgttccatgccacgcactccttcgtaagacagtacattcggatatttatattccagtccggcaggtttgaaagagccatgaaagtcgacaaacaaatgatgtttggctgcttcccgggctacccgttcgtaaaagttgaccatccactgatcgcttctgtccataaaatcaatcttaagtccttttactccccattcattgaaagtcttgaagagatcaaaattgttttctaccgtcaaccatgtcaaccaaagcacaatccctacatttttttctttgccataacgaatcaactcgtgcaagtctactttgggattaggcgtataaggatcacgtgtacttttagcccagccttcatccataatgatatatggaataccaaatttagaagcaaaatcaatgtaatacttataagtatccaagttataaccggaaacaaaattcacatccggtccgtaaggagaagcgtcattccaccattcccagctcacctgtcccggcttaatccatgaaatatcctgaagttgattcttttcagccagtttataagtcattgtgttctcaatcaactgcttatcatttttacttatcacaaagtaacgccaaggataatttctcgtaccttttgttttagcaatgtaatcagcttcttgagtaatcttcacgctacgatcactgttttcggcaaacgcaagcggagctttaggaaaaacagagattgctccgttcgtacccgttcctttgagaaacatacatggataatcagccagatccgactcgctgattaatattttatagtctttttgtgtgtcaatcaataccggcaaaacagctatccgttcttcaggcttccacgcattactttgaacatgtgtgtaaggttcctcataagctgtatggaagcctcccggttgttgcaagtgaagaagataatccgacgggaagttgatagcaaactcttcgttcattacttcaacatcacctttttgtgaggtaataaaccggtaagcaactccatcgtcaaaagcacggaattctactgcataatctttaaaggtcagtagcaattgattataacgattattgactttcgaatatttcaaaggaacaataggagttaattgctcgtcgacactcatacgtttctgacggcgcagtttgggattttgtcccaacacctgattcctcaatgtcaactgaagggtattgtctttcaataatacatcgccattataatctatactataatagattttatccgagagattcaaggacactttcagctctccattgggagaaattaactctaacttattctgtgcacgaagtagtgatgccaagcacaaacacacaactaacaggaaatatcttctcatgatttagatatttaattaataatcgttttacaatggcaaatgtaataaaaacatcacttcgtactatcaaacggactgggtaatactccttcaaaagtcattttcactggtttgatatacccgttttcattaaatttacctgatatttcattgtctttccgggcaacgacaaagaaggagctaccgcttcatccgataccgcacgcttatagttcggtttactgctcatgacaaaacgtagtttcacgccatcacgtatatcctcatatttcaaataagatttgtcatacttcttgccatttacatacaattcctttacatacacattcttcggcgaccaattatctgctaccatttcaataacttttccgttactcatccgaactgttattgcctcgacgcaaggagaaccgatgttatacatattgcttgaaggagccaccgggtaaaagccaatgcaattgaacatataccaagccgacatctgtccgcaatcgtcattgccacttaatgcatccggagtatcgccatagaaacggtcaacaatcgtacggacccacttctgacatttccaaggttctttcaagtaattataaagatacgctacatgatggcaaggttcatttccatgccaataggctccgatacggccttgaatatcatgtgctcccggaatgtcatccggcaactctaccgtgaacagttcatccaaccggttgcggaaccaatcttcgccagcttcgttcatatatccttgtacatcttgtggtacataccaggtatattgtacagtaaatccttccgtaatatccccccatccatttacagatccgggtccctgataagctaccggagtaaacggtgtacgccagtttccctgactgtccttgccacgcatatacttcgtttccggatcaatcaaagtctgataagagagtgcacgattcaagaaataacggtaatcatcctctttacccaaagccttggcagcctgtgccatgcaataatcatcatacgcatattccaatgttttagatactgattccgcctctttatcgaaaggcacatatcccatcatacgatattccggcaaacagtcataattcggattcatcgccgtggtcttcatagcctcatacgcacgttcgtaatcgaatcctttcactcccttcacaatcatgtcagccaatacggaaactgcatgataaccaatcatacaccaagtctcatttccataaaacgaccagataggaagcattttctccacacttttatcataatgagccaacatggaattggcaatatcgacattcacttcctgctgaactagattgaaccagggatgcaaagcccggtaggtgtcccaaagagagaataccgtatagttagtaaatccttcggctttctctatatttttatctaatcctcgaaactgcccgtctgcatcctgaaagatgaacggatgcaaagccgcatggtaagccgatgtatagaatgttcttttcgttttacggtcggcagtaagggtatattttccaagttctttttcccatagtgcttctcctttagctttcagatcatcgaaagcgagtccggcaagttccgccatattgttctttgccccgtttgtgctgaccgatgaaatagcagtttttacaatcacttcctctccggcttttgtatcaaaagagatgcaagccatcagattctttccccaagcctcatagctgctacgaaaccgtgaggtattgtaaatcaccggcttcttattctgcataaagcgcaagccggtcaactttttagagaaagtagccgtgaaatagatatgccgttccggtccccagcctttcaccagtttatatccggtgatggtagaatcattttccatgcgcagattcgcccattcacaagattgccataaagtatggttcatatcgatcataataaaagctttatccgattgaggataggtgaagcgaaacataccactacgtacccccgacgtcatttcagcctttactccataatctgacagttctactgcataataattaggtgatgcccattccttttcatgagaataacgtgaacggtatcccttttccggctcctcacgtgtccccggatccagtttcatctctcctgttccgggaataaacaagaagtctcccaaatcaggtataccagtcccgcttaaatgagtcagactgaaccccaacaaggtggaatgattatatttataaccggaagccgcatcatagtatttactatccgtgtccggactcatctgaattcctccgaaaggaatctgcgcacccggatacacattaccataaccatctgttcccacaaatggattcacataatcaatcagtttctcggtttgagccatgcctggcaaaatactcaccaggcacagccatactaaaaacaatcctcttttacccattacactcaccatatttacattattatgcttgtatatcacctactgcaacttgatattcatgccacagttcatcaatattatattcgtctcctaaaacatgcttgatagctccatcaaacgaccaagggataacctccaatgtactccggttaaacttacgcaggaattcaggatctttgttgtcacgtaaccacacgaagaaataacccgccgtacggtatccgtccatataatttccacctttcggacgggcattcggtccgtcaaatcctccattggcaacccgcacagcatctgccattccctcgataaatgcccagaacacacgattggttccataagagccgattccctgtggctccagctgatatgcgtgcgtcaattcatgcaagagcaccccgcgtgtttcaaaaaacaacttcgccgtatcattcgctgcaaaagatttttcaatgtgacgtgtactgtagaaaatcgtcacatcaccattaccaccacctttcgcagaaataccgttgatatcttccaatgtataatgtatcttgtgcactgcaggaatactatcttccggagaattgtaaagagtagctaatacagtacgtgcctgttccttgatatacgattcagcatcgggaatgatccggtggtaaatgtccgatcccagcgtttccggtgctttatcctcaaacaatacagcacctgtattgtactctttccatacatcagaattatccttcacctgtttttgcacacttgcagcacaagcccccatacctaccagcaggcaggctgcatagattaaatgtatctttttcatactcctttattgattattcgttgattccgttagttaatgaataaggtttatcctccggtgataatccgcgacgtttgttaggtgacgcccccatcttgaattcaagcacgcctcctttcaaaatgtcttcatgtgtaatgtacatcttgtcgtataccttaccgttcaatttcagcgactgcacgtaacgtttcttgtcgctgacacccggcgctttgatctccaatgtctttccattaggaagcgtcatcttcagataaggcaggtagggcgctcccaatacatactggtctgtaccaggacaaaccggatagaagcccatcacggagaaaaggtaccatgctgacatctgtccgcaatcatcatttccacccaatccgttaatatcattcttatacatcttattcagaatctcacgcagccagtactgtgatttccacggctgggaagtccacgcatatagataaggaacatggtggctcggttcattaccatgcacatatccgccgaccaaacagtcttccgtaatatcctcattatgttcatagtacttctccggcagatgcatggagaacagttcatccaatttctgcacgaacgtcccttctcctcccatcaaatcgatcatgccaaatacatcgtgcggcacatgaaaagagaaattccatgaattgccttcgataaaaccttcaccataggtttgtaatacatcaaactctttcttgaaagaaccgtcactataacggggacgtgcaaaaccaatacttgtatcatagatagtacgataattgagggcacgctttcggtaagtctccgctatttccttgttacctgccttcaaagctgtctgatagatagtccaatcgtcgtatgcatactccaaagtagaagaggctgctgtaccacttttgtcaagcggaatatatcccagcttcatataatcagctataccttcataatacggaacggtggatgtactgaccattgccgccaatgcctcatccacattcgaaaagacgcctttggttattgcatccgccagtacagacacagcatgataaccgctcatacaccagttttcatttcccatcagactccatatcggcaacattccgtgcacgctttgttgctcatgtttaatcatggattccaccatatccgcattgcgtcccggtttcaccagattcaggaaaggatgttccgcacgataggtatcccaaagggaaaatatagtatagttggtaaatccttccgcccggtgtatgttatgatccagcccacgataggaaccgtctacatccatatacacagacggattaatcatggtgtggtaaagagaagtatagaacattgctttctgatcgggcgtaccttcgatctcgaaatgcttcagttcactattccaatctgtacgagcagcttccgccaactgttcgaaactctttccggaagcctcggcatgcagattcttaatggccccttccgtactgactgccgacaatgccacttttacaaccagttccgaattgttagcggtatcgaagttaaagtaagccacgatttttcgacctgtgatttcggggaagttcttttccaacttaaaacgacgccaaaagccattgtacaatactttttccttatccttatatccgtagtctttaatcggctgtgacaaagagatagcaaaataggtataattcgtacgcgcccatccattggtgatacgatatccggtcaacagagtatcgttttcgactctcaaattggcccatagaactttgccgtcataattataaataccatgcaccagatccaaaatcaaatgaccatcttttcctttcgggaaggtatatttatgtatacccgtccgttgtgttgctgtcagttgggccttaatgccataatcgtccagtatcacttcataatatccgggaacagctttttctgtagcatggtcaaaacgtgaacggtatccctcttccggataatccgcccgaccgggatttaacttcacatcgccaacagcaggcatcaacaagatgtctcccaagtcagaatgtcccgtaccactaagatgagtgtgactgaagccaacaatggtcttgtccctatattggtaaccggcacaatactcgtaggcatttttctgataagctccatttacattatgcggaattgtgtctgtgtccggactcaactgtacccatcc

SEQ ID NO: 8362 - DNA, 663 bp, Unknown
  gut microbiota DNA sequence
tacgggaagtctgattcgttgatacctcttcccttattcggtttgttatccatatcaaacaccagacgaccgcctttcaacagatcgaaatggttcagataattctttgtataattcttgccattataattcaatgaacgaatataacgattatcatcgttattcttcggggcggagatttccagtttcttgccgttctccagtgtaatcgttgctttcttgaagtaaggagctcccattacatattcattgctgcccggacataccggatagaaacccaatgcagtaaatacataccaagccgaagtctgtccattatcttcatctccacaataaccgtccggagtaggaagatagaggcggttcatcgtctcacgcaaccaatattgggctttccacggttcgccggcatagttatacaagtagatcatgtgctggataggttggttgccatgtgcatagttacccatgttagcaatttccatttcacgaatctcgtgaatcactcctccataatagctatcatcaaatacaggaggaagattgaacacagaatcaagcatactgacaaacatcttcttgccgcccatcagatcaaccagtccttgtacatcgtggaataccgaccatgtataatgccaactatttccttccgtaaaggca

SEQ ID NO: 8363 - DNA, 2162 bp, Unknown
  gut microbiota DNA sequence
gacacagagaaacgaagtgtttctcaccgagaaacgaatcgactgataaagtcctaaactttaattgaggaaattgttcgtctcttttatttttgacacttctatcgtaggaatgtatatgttgaaatatatttcaatgataatcttatcatgtctaaaatataatgatatggaataaatttataaccgtaccgtttggaatcaattaccactaatgattttattagttatttttaagcgatcctttacctattaatagttatttcattgcctaaggagttttcgcttgacaattgttaagcgatagttcaacatctgtcaagcattcgttcaacaactgtcaaacgataattcgttaggcaattgaaaaaataatataagcaagaaaaagagataaaagctgcatattgacgaattattgtcagcgatagtgttttgggttatttccgtaccgaaacaagctaaatgctaatttagagttcaccacggattacacagattcacacagattattttcattttcgttgaatacccatagtgaattagggtactgatatacatacttattccaccattgccaacgtcaatatactaatccgtatatcttctacatctaccaggcaggaagcacatgccagagtagtagagccggtagtcaacacatcgtcaactatcaatatgtgtttacctgcaagtgtttcgggatgctgaagttcaaagataccttccacattatcccgacgttcaaacacagatttacgcgtttgcgtttccgtatttttcttacgtaatattgattctgtatcgatggggattcctgttacagcagcaataccacgagcaatccactcactctgattataaccacggatttgctgttttttcttatgaagcggtatgggaattatcacatcaattccctgaaaaaaattggacgataaaagctcggcagccatataccgccccataattgcacctatttccttttgtccaccatatttcaaccgatgaagaatcaagcggaagtcacttcctttctcataaaagaaaaaagaagtagctcgttccaaagggatttgtccccagaagagccgttctaccggattatcttttcgaagatgataattagtacggggtagattgatattacatactgtacaaatacattcttcaccctttgctaacggccggccgcaaacaacgcagcaacggggaaatagcaaagataagaaggaactaagccagtctttgataagaagtgtgtgtttcataataatagagatttaaagttgcaatagcacctacatattgcaactacatattcaatggaggaacttctaacaggagtttctgaaagacaggatgaagatttccattcgttgcaataatatgatgtccttctatgaaatgatcctcaccataaaagtcagtcacctttcctcccgcctcctgaacaatcagtgccgctgcagaataatcccattttccgagaaatgcttccatccatgcatcaaaacgcccaatagctacataacagattgcggcagcagccgagccattcatgcgaatacctcccactaccccataaagctgatcgatgagatgaagagcagtctgtttatattgcagatgattataaggtaattctgtaatgacaaatgcatctttgatgtcctcaacgttcgacacatgaatttcttcgccattcataaacgcttttccgcctttccaggcatagaaacattcatcccggcaaacctcataaacgacgcctaaaagaagttcggtacggctacgtaaagcgatggacacacaataaggagcctcatcatgaatataattcgtagttccatccaaggggtcaatcacccaacagtatggctcatcctgataagtggcagagccttcttctgtaatgaatcccgcttcaggcagtaaagcagtaagggctttcaccacacgcacttcagattctttatccacataagacacataatcgtgtgcatgtttttccaccacacgctcacgacggaagttctttcgttcttcttttaaaaaagatccaacttctgtagcaatccggcatacatcagttgtaagctgcttcaaatctaacatttatttactcaaattaaaaagtgcttcgaagttatagcttttcc

SEQ ID NO: 8364 - DNA, 1790 bp, Unknown
  gut microbiota DNA sequence
ccgaacctgaaatgggaacgtaaatacaccctcgactatggagttgaaatcggactgtggcacgataaaatctatctgaaagcctctgcctacgacgagcgtaccatcgacctgataaccgattataccatcccttcctctaccggattcacctcctacaaagaaaacatgggaaaggtgaaaaacaccggcgtcgaactggaactgcgggcacgactttacagtgacagaaactggctcttccagctctacggcagctttgcaagaaacaaaaacacgattattgaaatctcccaggcaatgcgcgactataataaaagagtggaagaactgttcagcggatataaccccgaaagcagctccgattcaaaatatgctaaaacatacctgaaatattacgaaggagcctctctgacctctatttacgggatgaagtcattgggaatcagccccacaaacggcaaagaaatctaccttcgccggaatggtgacgttaccgatgtatggtctgccgacgaatggaccattattggcgatacagctcccaagggacaaggctcattcggttataccctgtcctataaacagttatccatgtttgcttctttcctctatacttttggtggagatgcttacaacaataccctcgtctcctatgtagagaatgccgacattaaaaatgacaatgtagataagcgggtattgctcgaccgttggcagaaaccgggagacataaccaccatgaaagatattcgtgaccgtaatgtcaccaccggcgcatcttcgcgttttgtacagaaaaacaataccctgcaatggagttcattgacaatgagctacaatttccgtcccgaacaattaaagaaactccatctgtccggcctgcgtctttcgttcacgatgaacgacctgttctattggtctaccatccgtcaggaacggggactggattatccttattcgcgttcattcaatctgactactaacatcatattctaaccatacaaatgaagaaactaatcagccatatactaatagccctgacaggaatgttagccgtttcctgcaatgcctggctggacgtaacaccagaaaatgcgatagccgacgacgatctgttttccaccggtttcggctaccggaatgccctgaatggtatctacaccaatctggcgtccgacgaactttacggtaagcaactaagctggggattccttagtgccatctcccagcaatacaatcaaaaggcgggaaccatctctccgatgtatgccgacgcttccgaacttatctataacacggtcgacaccgaacccgtcgtgacagctatctgggaaaaaggctataaagtgatagccaacctgaacaagctcatcgagaacatccggcccacggacatctctttgttcgaatacggagaagaagagaaaaacctcatttacgccgaagccttgtcattaagagccatgatgcattttgacctacttcgcttgtttgctcctgcaacggcaaccaatccttcgggcgcctatcttccttaccgcgataaatacgaagccgcagtggtagaaaaatgtaccgttaccgattttatcgagaaagtcctgaaagacctgctcgaagcggaagacattctgcgtaagtttgacaccgaataccatcccgaagcgatgtacgcttcacaaatgtacgaacctactcccgaatggaatgcccgctaccgcttcaactccggttcctatatagacgatatgggagcattcttctggtatcgtggcatccgcttcaac

SEQ ID NO: 8365 - DNA, 322 bp, Unknown
  gut microbiota DNA sequence
cctacctcgcttatctctatttattaagatggtataaagatctcccttacttaaagccgtttcgtcaatacataggtgataacccatattctttggataaaggatatactcttgggcatgtgctctctgatcccaattctggaagtcactcaggtggtctttatattggctttgaagctgtttgccatccatacagtaatgctcagctacactttggcagctaacggcgtgattatctaagtaattcttttaaaaaagcaccgaactcagcggttatgcgagtaccggtggctaccaaactccagtcacgactatatgtctg

SEQ ID NO: 8366 - DNA, 5332 bp, Unknown
  gut microbiota DNA sequence
atacctttgcgttattgagcaacttattaagaaccggatgatatgttaaaacggattaaatttcaaattctgtagaagtgtacatcccaataaaatactaaaaaggcaagaacatgaaactttggaaatatagtggaacacttttaacagcaacaggagtcattcataccatttatgcgctatttcttggaaaagaagcttttacggaaatgcttaacaatggattaatagactctattggagaaaatcataacctgggctttgctttctggttcctaatctgcggaataatacttattctttggggagagacacttcaatactatatcagaaaagagcaaaaaccggcacctttatttttaggttacttcattctactattcaccataatcggttgcatagtcgaaccaatatccggtttctggcttttcttaccgcaagcacttattattatttattcaaacatgaaaaagcagtgagaagtatcatccatagcgaactcaaaaccgagtgcaacacttaaatgcaacttattaaaatcccatagcatctttcactaaaaccatttctttatgagaggtcaacttctctaataaaagcaatgcaaccccgtatgatgtttgaggacaataagaagttatgatattatcatccaccacgatgggagaatttacaatagttgctccaaatccctgaagcactttctgtttatgagcacctctaagatgataagttgttgctttccgaccgttcaacactccacttttcccaacaggtaaagcccccacgcagactgttgcgatccatttcttttgcgagtcaaacagtcgtatcaattccagaagttgttcattatatgcctcctcatagaatccgaattcttcaaatccgccgggtatcgcaagcgcgtcatattcatctgcagacacttcatccatgactttatccaccaaaacaggaacattgaaagaactaatcactttttgattcaaaccacaggtcacaacatctattttacaatcaaaatccgtctttgcccatcccataacatctataaaagcactaaactcaatcgtttcaaaccctttagcaaggaataccaataatttcataatcaaattagttatatattaataatataagaaacagcattgccctaaaaagaacatgagctaaaatcaccttcattcttccctataatcccctctttacctcaccttttgcagcctcccaaccaatcattgcagtcttacgaatctctccccaatggtaatttcccaactcaccggaagcacgaatgacccgatgacacggaataaggaaagctacgggattctcaccgacagccgttccaacagcccggcaagctctcggattattgattcctacggctatatctccgtaagtagtcaagccaccgacaggaattttcagtaaggtttcccatacctttagttgaaagtcagtacctttcagatgcaattttatttctttgagtttactccagtcctgcgtgaagataaataaagcattttgctgcacttcatccacaatcgaggtaaactttgcattaggaaacttcttccgtaaagagttaaaagccgcgtcatgatcgtctgcaaactccatacaacaaatacctttatcggtagacgcaatgaagatttcaccgaaaggacttttggcaaaactataattgatagaaagactttcacctccgtttttatattcgcccggcgtcatcccttctatatttacaaacaagtcatacaatctgcccgtaccggaaagccctgtttcctgtgccgcatcgaataaagacgcatgagtttcattcaagattctcttggcatattcaatactagtatattgcaagaacttcttagggctaattcccgcccactccgtaaacatacgttggaaatgcgctgtactcaacgccacctccccggcaatctcatccaatccaggttgccttttaaaattctcccttatatacccgattgcctgcgcaatacgtgcatagtcaagcgttttttgctcattcataacagaggtttgccatttaattccaaatccagcaaccgctttttggcaggcaatccgcctccatacccaacaagcgtgcggttactaccgatgacacgatggcacggagcaaaaatagaaatagcgttcgccccattagcggcagcaacagcacggacagctttcggcaaatcgagttgttttgccagctcaccgtatgacacagtcgaaccgtatggaatctccaacaacttataccatacactcttctgaaactccgtaccaacaaaaagcaaaggcacctcaaacacagtccgctcgccattgaaatattcatctaactggctcatcgcctcctgtatcacatctgacgtactttcctcataaccagctttcagcactttccgcaatctcctgtctacgatatccctatgactttcagccgcccagtcacaaagacaaagcttatcctccagcgagccaagcatcaaatcaccacaaggagaatgataacgctgtatcttaatcacattcgttttatcttccatacttccaaagatacgtttattatatttacagttgaaataacagctaataatattttcgtttttatactcgcactcttatttccaatgccgcaaaattactacacgcatcactgataaacgacccgaaaattgctattcttacatagaaaagacaatctcccctcccactcctccatacaatcaatcgttctcaatatactttattacccggcaaggactgccgatcgccacacaattcttaggaacagcattggccttcatactcgtacaaagtgatataaagcagaaagtgggaaaacctatccctcaattcaatctccaattattttttatacatgatttactctcacaccctcacactttccctgcattcccctattcatcgtcctttcagtaatgagggtaagagtgagggtaggtgagggtaaaaagttaccctcaccctgtctcgtcctgattttggttgacaaagccccctttcacaccacctttatcaattactctactttcatcaaatgataaagcgtccctttacgagacttacggcaaggaatattcagtttttgaagtgcacgcccaaactgtcctaccttattaatagccagtttatcccgtgttttcgtctgtaaataattcaaaatctgcatggcagtcagccattcgccttccatttcctcttctacgggattaagatagcagtggaacagctgttccagcggactcacctgttcaaactcacggttagtctgttttaatatgttttcatcctcatcattcagccaataacgttcccctttataaatcgcctccatcgcttgagcataaagctgcttgtaattaatcgtaacattcgtattaataggagccgtcacctcaatgcaaataaaacggcggctaccgctaggatcggtaagcaaatctttctgattgctggtaccgataaaagaagcataacgcctcatttcccgaatcgtattaccgtatggtttgcgcagattcgccacaggcttctgcaacaaatgcttcaagaacccctgctgactgacattaatctgatcgaactcatcaatatttatcagaaaaaaacgtcccaaatagcgttccgcctcctgtttacttttaaaatcaatactgtccgtatagccgaaacgcaactccggcggcagaataatgcgacagaatgtagacttacgatacccctgcgaaccaaccagcaaaggcgaagtattattaccatgctgccgatcgactcccctccaatgcgccaccatactaagaaaccagcggtaaaataattcctgccaatgcggattatcacaaggcaccagaccagccaatgcacggatacgatccttcccgtcccagcgacctgtctcataaagatattcctccacaggattatacaaagaaacacattccgaattcagaaaacgatccacatcacggtcccacgcactgatgccttccttcaaagcattgatcgcaatactgttgcgcacccgtttatccaccggcttaaagcaaaagtgaacagaatcgcgttgccgatattccaaatcgtcctgcaccgtattgtaacggaattcataccgacgtttcataaactcttccaacagaaaagccgtctcctgctctttattgatactgcttttcttgccgaatcccttacattcctgataaagattatgcagtatcgaacggatcacctgctcttcttcctcgcgataataatgaatcatcgtctgtcgtatcgcttcctcttcgggaagccccgctttgaaacaatgctcggcaaggcgaaccaataaaggctgcaagtcgtccccacgtttccaatcctccatttcctgaagtgccctgttcaaggccgcttcataaatcttcgtgaatgtttgcgccgactcatatcccggctgcaaccgtaataacggatttttctctccctgtttccgctggcggaaagtctcttctcccagcatcgtaagcggttgttccaggcagaacggcaccgcatccggattataataagaagattcgtccagcgtcatacggcatctctgtgccaaaacaggttctttcaaatcaatatcgaaaggcaacatcggctgataacatttcacagccagccaataagcatgaacatgaaataattccgcctccgcttccttgaccggcaaccctccgtcatccggcaaagcgaaacgcacccatatctttacactacgcccgctggagccacaaaaagcggcaaaagtctgtggcagaagtgccgcttgccgtttcacaaactccgcttccgagccaccggccaaccggctcacttccaactgtaccaaaccgttgtactgcttcattttccgttcgccctctttggtacgggtatattccacagcagaataaatgtatggcaatttatcaatatgttcgtatcgggcatacgtaccttccagcaacggtataatctcccgcaaagccgtgatatgtcccgccttggtttccgtcttcattttgtcgaatagtgtgcctgtctcacaaatgctaagagtttcttttccgctcccgttgtcttgtctgattaaagtaactttcatcctatttttgtctattttttctacaatcacatctacatatttaattcctgtaaagatacgcttttatcctccggtaaacaagcattttatccgataaatacctgcatattatttgcatttgccttattatttatgtatctttgcttagtagttgtcaagggctca

SEQ ID NO: 8367 - DNA, 1099 bp, Unknown
  gut microbiota DNA sequence
atcatcaccaccccgcgcagtgttcatcctgccaaagtgataaaagacaaactgaactacgccgccacgctccgcgccacttacaacgtaacccggcaattcgggctgactgccgacggaacagtagccacccgcttcccccgtatcaacgaatacgccggaacaggtcctacggaagaacaatacaaacgggtcaccataccgttaatccgtggcggtctgttctacaagaaccattggatcaacctcacctctatggtgacctatatctctaaatccaataacatcgaccagcaaaacctcacgaaaccgggaacggaagaaggaaagaccgttttgcttatctataatatcaaaacactgggatggaccacttctgccgagatcgacccgttcaaaggtttccatctgcatgccctgttcacgtatcagaagcctgtttacaagaactataacgcaagtgtcactttcaacgatggctcggagatgtctgtcaatgccaacggaatgatcgtaaaagagatcccgcagatacttgtcgaactcgacccaagctacaacatcacgaaagacttacgcctctggcttagtttccgctatttcggcaagacgtacgccaatcttcaggaagcgctctacttcaacggtcgctgggaaacgttcggaggaatcaactggaacgtaaacaaacatctgtctctaggtgcaacagtcatcaacttcctgaatcagaaaggagccagcggaaccatcaacggttcggaactgattacgaaagaagaagctgcccagtacgccggaaattatatgagtggaaattatttacgcccattcaccgtagaatttagcgcaagcatcaaattctagttcataccaaacgaattataattatctttgtggcattatatgcccacgaactaactaatacctaattaattattaaaaaaccatgaagaaacttttcgtattacttacggcattgtttaccctggcacaagtgaatgcccaggaaaagaacgttatccgcatcgcaacggacaacacagacttaattctccaagtagctcccaacggacgactttatcaggcttatctgggc

SEQ ID NO: 8368 - DNA, 1317 bp, Unknown
  gut microbiota DNA sequence
ttggtctgtatttgttctttattgaataaatattatcgttttttttcagctatttctgcaatctttgtaacaggaaaaatactataaacttataaactatcatgaaaagcaaaattcttttggctctgacactactattgggagtatcaactaccacatgggcagtcggtaatttaggaaaagcaaaccagaagaagcatgcgtatacgaacgaagatgtatgggcagcttatgaaggatttaataatacactactagactccaataaatatatttacaagacaaattcgtcctatccaagtgctgttgaccgtggcaatggagcagcggctatctggtgtcagcctatttattgggatatggcaatgaatgcctataaactggcaaaggcacagaaagacagaaagaaaacaagttattataaaacactctgtgagaaaatattcgcagggaacaaagcgcaatattgtcagtttgattttgatgataacaatgaaaataccggctggttcatctacgatgacatcatgtggtggactatcagcctggcacgcggctatgaactttttggagtggatgaatatctgaaactctcggaagccagtttcaaacgggtatggtatggctcggaaaaagtgggtgatacaggttcgtatgacaaagaaaacggaggtatgttctggcaatggcaacccattcaaaatccgaaaccgaataaatttggtgatggaaagatggcatgtatcaactttccgacagttgttgcagcattaaccctctacaataacgtgcctgaaaatagaaaagaatcgaccgacaaacggccggattatcagacgaaagctcaatatcttgccaaaggtaaagaaatctatgaatggggagtggaaaatctcttggataaagcaacaggaaagattgccgatagccgtcatggaaatggcaatcccgcgtggaaagcacatgtatacaaccaggcaacctttatcggagcgtccatactgctttataaggcgaccggagagaaatgttatctggacaatgctattctggcggcagactatacagtgaaagatatgtctgcagaacataaagtgctacctttcgaaggtggtattgaacagggaatctatactgccatctttgcggaatatatggcatggttggtgtatgattgcggacaaacccaatatctcccgttcctgaaacgtaccatcaaagcaggttgggcaaacagagataagacacggaacgtatgtggaggcgaatactataaaaagttgccggaaggtgcggaaatcgacagttattctgctt

SEQ ID NO: 8369 - DNA, 696 bp, Unknown
  gut microbiota DNA sequence
cttccgttaccggagtagaccgtgctttcggacagattttgacgacattgaaagaattgggattggacaagaatacagtcgtaatctttgcttccgatcatggtgagacgatgtgtagccagcgcactgatgatccgaagaattccccttattctgaatccatgaatattccgttcctggttcgttttcccggtaagattcagccgagggtggatgatttattgctctccgctcctgatattatgcctacggtgcttggcttgtgcggactgggtgattctattccggcggaagtgcagggacgtaatttcgctcctcttttcttcgatgaaaaggctgaaattgttcgtcctacaggtgcactgtatattcagaatgtagatggcgataaagatgaaaatggattggtgcagacttacttcccttcttcaagaggtatcaagacggctcaatatacattggcgttatatatcgaccgtgatacgaagcaattgaagaaaagcctcttattcgatgatgtaaaagatccatatcaactgcataacctgcctttggaagaaaataaggagattgtggcacaactttgcggtgaaatgggagctatgttgaaggaaattaatgatccttggtatacggaaaagattctgtcggatcggataccttattagcgattagtaatttataaaacgctgatta

SEQ ID NO: 8370 - DNA, 373 bp, Unknown
  gut microbiota DNA sequence
aggatagtgaaactttagtttcaaacgtgcgacactagggtttcaaggcttgaaactggagtttctaaggcgggaaagcaaatacttccttacggctaagaaatatgaacgatgtaagttgtgattcttaagaaagagagaaggaaaagaaacggtgacagcaaaagtgctatcaccgtgttgtcacacactgctgtcacatcataatatatttgtaattagacatttaaacacaaacaggtgacagatgacagcaaattttcactttttaaatctctagtaaagtgttgtgagattatatttcagctcatttccacacgattttactcatttccgtaccgttttgaataaaataatggagtattctggaaac

SEQ ID NO: 8371 - DNA, 1480 bp, Unknown
  gut microbiota DNA sequence
aatcttcggtcccacacaaagagccgtatttgaaggcaatgtccatggagtagttgtccaggcgataaaataaggagttccccattccgtcatttccggtttaggattcttcattttaaattgggcaacggccgttgtatcttttacatcccgataacagcccggttgattcaactcatgtgagctcaatcctgttcctgcagccggtgaatacggttggatcgtatatcctttatacaacaatccttttttatgcagttgcttcaatagccaccataatgtctcaatatagcgattatcatacgtgatataaggatgcttcatatctacccaatatcccatccgatgagtcaggtcttcccactccttggtatatttcatcacgtctttccgacaagccgcattgtagtcggcaacagagattttcttaccaatatcttcttttgtgatacctaatgccttttctacacttagttccacaggcagtccgtgcgtatcccatccggctttacgcttcacctgataacccttcatcgttttgtagcgacagaaaatgtccttaatggtacgagccattacatggtgaatacccggcataccattagccgagggaggtccttcgaaaaacacgaacgaaggacagccatcacgttctgtcatactcttggcgaaaacctggttctcgtcccatttcttcagcacatctttgttcacctgcgaaaggtcaaactgcgaatattcagtaaatctcttacccatagctgtctacgattttactatttacaatttacaatttgaggggtatccccatttttaagggtgcaaatttacaaaaacatttgtttagttgagcaaaaagctaagacttttaatcggattcgtgtgaagttaacgattataaactgcctacagcctaaacaaaacaggtatctccttgttttagtgggaaacctaaaagcactttaacttatgaattacggtattagcattttattcagagcaatccctttggcgatggctattttttgcttcggatacggagcgttcatttatggttatggagatgacgggagtcgtgttgtggccggtcctgttgtgttttcactcggtatgatatgcattgcactgttttgcacggctgccactatcatccggcaaatcatacatacttataataaatcggccaaatacattttgccggttataggctatctggcagccatcattactattattggaggtatctgcattttcagtaatgccacttccacctctgcatttgttgcaggacacgttatcaccggcgttggatttattaccacttgtgtagctaccgccgccacctcttctacccgattctctttaattccgaggaattcaaaagcgacaagtaatgaagttccggaaggagctttttcccttaatcagagacgggcattggtcattgttgccatcatcgtttcgctgatcgcatggatat

SEQ ID NO: 8372 - DNA, 2211 bp, Unknown
  gut microbiota DNA sequence
ggcggggcatgtaatggtcggtctggcatgtatttgtaccagtttgattgcgctggtagctaccatagcacgccagatacgtaatgattattcagaaaaagaacggaataaatggccgaaactggttttattaatgggatctatctcttttgtatggggattattcgtgattttggcagattccggaagtgcaaacggtaccaccggatatattatgctcgggttggggttggtatgttacagtatttccagcaaagtaatcctgctggctaagatatggaggcaagagttcaaattagccaaccgtattcctatgattccggtattaacggcattggcttgtctgttcctggcggcttttgtattcgagcttgctactatacatgctgattatttcattccggcacgtgttttggtaggtctcggagctatttgctttacgctgttttctatcgttagtatattggagagtggcacgtcttccaaataaaaaagtattctataaaaagggcgtcactatatgccccggatagtgacgctatccaaggcatatagtgacgctatccggacagcatagcgtcactctttttatttcttgtatctcacctcatacaggtcattcctgcggtctttcaagttgcgtacactaccataagtatgcagctcgttcagcaaatccaggtcaacatccgataccaaaatcatttcggtgttaggagttgcctctgccctctttccgtctgttggaaaagcaaagtcgcatggggtaaatacccccgattgagcatattgaatatccatattgtgcacacggggaagatttccgacacttccggcaatgaccacaaaacattcattctcgatggcacgtgcctgcgcacagacacgaacacgggaataggcattctgggtatctgtcaggaaaggaacaaataatatctgcatcccctgatctgccatcaggcgagaaagttcggggaactcgacatcatagcagatcaaaactccaatctttgcacagtccgtgtcgaaagtattcagaagtttgccaccattaagtccccagctttttatttcatcgggagtgacgtgtaatttttcatacatttcgtaggttccatcccgccgacaaaggaaacctacattataaagtagcccatcctcttttacgtatggcatactcccggttataatgttaatattatagctaatagccagattcataaaccgttcccgaatttcatccgtatatttcgccaatccgcgaatggcttgcgattcccccttatcgttatacttcgacatcaaaggagcattgaaatattccgggaaaagaacaaaatcacttttataatcagatactgcgtccacaaagaattctacttgttcgaacaggtcatccaacgttttataactacgcatctgccattgcaccagtcctacacgaaccgtagttttagggctgatatattcctgtgtaggtggctgataatagatattatcccactgcagcaaacaagcataatgttttgattcttcatcatttggcagataattagtcattaccttacgaacgtgaaaatcattcgacaactggaaagtaagtaccggatcataaatctcgcgttgacgtacccgttctatatattctttcggacgcattttgtcagcatatttatgataattcgggatacgtccgccaaacatgatcgctttcagattcaatgtttcgcaaagctccttacgatattcatacatacgacgtgcgagacgcaaaccgcgatagcccgggtggatgaatacttcaatgccatacaggatatttcctttgggattatgtgtattgaatgtttccttacccgtaacctgtgcatacgtatggtcgttctttactttatcataatcaacaataatagaaagagcacaaccaactattttatcgtcaacgactgtgacgatctgaccctccggaaagattttaatcaacttctgaatctgctcacgagtccaaaacacatcgctaccgtcagaataaacgcgggtaaacgattgggatagttgtacataatcttctatttgcagattgcgtatctgcactttattaatttttatcggatgttgttccataacaatacgtgttttataaaagatagtgcaaaggtatagttaatcctttaattgtgttttgaaaccaagaaaaattaataatag

SEQ ID NO: 8373 - DNA, 1509 bp, Unknown
  gut microbiota DNA sequence
cattacgacctggttctctttctgtcccatacagcctctgctttatctccgcaatttctggacaaaatatacaatgcatacgatgccggtatacaagccatccagctacatacggtaatagaaaaccgcaaaggtttccgtaatcgcttccgtgctatacgtgaagaaataaaaaacagcctttgcagagccggtaatacacaattcggactatcctcccatttgctgggaactaatatggcaatcgatctgaaatggctgcaaaagaacatgaaaagttccaaaaccaatattgagcgaaagttattccggcagaatatatacattgattacctgccggacgtaattgtatactgccaatccgctccggtctgcccttatcggaaacgtatccggaaaacgacttcctacttgctcccttccatatttgagggaaactggagtttctgcaaccggatcgtacaacaattgacaccttctccacttaaattatgtatcttcgtaagcgtttgggcttcgttgataaccgtatacaattggaccttatcattcggatggtggatcgcactcttcggtctattaatcacttacagcctggcaatccctgattatctggtagaagacaaaaagaagaaaaaacattcaatatggagaaaaaaacacttaaacaacgaattaaagaaaaccccggcttgaaacaggctgtgcatcgtttcatcatgcatcccgttaaaactcgccccaactggtggatacggctcttcgatttcatatacctgaaacgtggaaagggttctgtcatctaccggagtgtccgcaaagacctccctcctttcaaccggttcttcttgggaaaatattctgttgtcgaagatttctcctgtctgaacaatgcagttggcgacttaacaatcggagattatacacgcatcggattaagaaatacaatcataggtccggttcatatcggcaaccacgtcaatctggcacagaatgtaacagtcacaggactcaaccacaattaccaggatgcggaaaagatgattgatgaacaaggagtcagcacactgcctgttgtcattgaggatgatgtatgggtaggcgccaattcggtcattctaccgggagtaaccttaggaagacattgcgtagtggctgccggaagcgtagtcagtcattccgttccaccttattcaatatgcgccggatgccctgcaagaatcataaaagcatacgatttcgagactaaagagtggaagaaagtagagaaaacgcctgccactaaccataaatagtgagaactactacataatatacctcataaaggtgattgtgactcatactgaaacgaactatctttgcagtatcagaattgaattaattagtcataattttattacgtagccacatttaagtaaaaaatgaaatagaatcctgccgaagcgatttcgtcgggattttgttttttattaccctcctaacctgcaagatcaagcaaccctattcatc

SEQ ID NO: 8374 - DNA, 1207 bp, Unknown
  gut microbiota DNA sequence
ataaaatagataaagcggataatgtatgcatcagtgccctatccgaatagagccctgaatgcttcctccacctttcttaccggcactaattcgatcttcagtttcgtagtgtcaataccttgcagattgtattttggcaacaagaaccgtttaaaacccaatttctcggcttcaccgatacgttgctctattcgatttacaggacgtatctctcccgacagtccgatttctcccgccatgcaaacttccggctcaatggctgcgtccatattggaagaaaggatggcactgataaccggcaagtcgatagccgggtcattcaccttcagtcctccggcaatattcaggaacacatctttctgtgccagcttgaatccgacacgcttttcgagaacagccagcagcatattcattcttcttaaatcgaaaccggttgccgaacgttgaggatttccataaacagcagaactgaccaaagcctgtgtctcgatcaagaacgggcggattccttcgatagcggaagcaatagctactccactcattccctcatgatcctgactaagcaaaagctcggaaggattattcacctggcgcaacccatcctgacgcatttcataaatccctaactctgccgtactgccgaaacgattcttgatgctgcgcagaatacgatacatataatgctgatcgccttcaaattgaaggacggtatcgacgatatgttccaatactttaggtcctgcaatacttccttctttattaatatgaccgatcagcaacacaggggtatgcgtttctttcgcgaaacgaagaatagatgccgaacactctctgacttgcgcaatacttccgggagatgattcgatactctcggtggaaatagtctgtatagagtcaataatcactaaatcgggattcgtattcttgatatgcacataaatttgttcgagcgaagtctcacaaacaatcaggcaatcgctggaagtatcagagagacggtcggcacggagtttaagctgtcgtgcactttcttcaccggacacataaaggattttcttttccggcatgtgcagtacggtctgcatgacgagcgtggatttaccgattcccggctcaccgcctatcaggacaagagaacccggcacaagtccgccacccaatacgcgattcaattcatcatcgtgcatattgatgcgtggctcgtcgt

SEQ ID NO: 8375 - DNA, 1855 bp, Unknown
  gut microbiota DNA sequence
tttgattccccgcatcatcacggagatggcgcatagcgaaacgggaattgatatccatccggccgcaaagattggcactcacttcactatcgaccacggtacgggtgtcgttatcggtgccacgagtattatcggaaataacgtcaagctatatcagggcgtcacactgggagccaagagtttcccgctggatgccgacggaaaaccaatcaagggaatcccccgccatccgatcctggaagacaatgtgattgtttattccaatgctactattttgggaagaatcaccatcggacgtgacgcaaccgtaggcggtaatatctgggtaacggagaatgttcctgcaggagcaagaatcgtacaaactaaagcaaaaaaataaaatcaaaagaatctatatgagcgaacaattcgagatgatagccaagactttccagggactggaagagatacttgcagaagaactgacagcattaggagccaacgacattcaaataggacgccgcatggtttcattcacaggagataaacgtatgatgtataaggcgaatttttgccttcgcaccgccatccgtatcctgaaaccaattaaaaactttacagccaaagatgccgatgaggtttataatcaaatacaggctattccatgggaagaatatctcgatgtgaacaagacgttcgctatcgatgcagtagtattcagcgatgagttccgccattcgaaattcgtttcgtataaggtgaaagatgcgattgtggattatttccgtgataaaacaggaaaacgtccgtcggtacgtatcaacaatccggatgtacttctgaatattcatattgcacagactacctgtacgttgtctttggactcgtccggagaatcacttcaccgtcgcggttatcgccaggaagcagtagaagccccgttaaatgaggtattggctgccggcatgattctaatgaccggatggcgcggagagtgtgatttgatcgacccgatgtgtggttcgggtactatccctgttgaagcggcactgattgctaagaatatcgctccgggagtattccgtaaagggtttgcttttgagaaatgggtagatttcgatgcggatatgttcgatgagatttacaatgatgacagtcaggagcgcgaatttgctcataagatttacggatacgataacaatccgaaagctaatgagattgcgactcataatataaaagctgccggtgtatcgaaagacatcgtgttgaagctgcagccgttccagcagtttgaacagccgcaggagaagtcgattatcatcactaacccgccatacggtgaacgtatttccactaatgatttgcttggactttatcagatgatcggtgaacgtctgaaacatgcgtttgtaggaaatgaagcatgggtgctttcttatcgggaagagtgtttcgatcagattggtttgaaagcaagtcagaaagttcctttgttcaatggaccgttggagtgtgagttccgcaaatatgagatttttgacggaaaatacaaagagttcaagagccaggaagagggagaagaaaagaaagaggctgaaggagaacagactccaagattcagagaaaaaaaagaatttaagccacgccgcgaaggtgaattcaaaccgcgtcgggatggtgaatccagacctcgcagagagggagaatacaagccacgcagagaaggtggtgagttcaaaggtggcgatggaagagatagaaagccgcggggagagtttcgtggaggaagagattcaagagggccaagagaatttagggggaaccgggagccgaggattccgaagaaggaagaggaataggctaagattcaata

SEQ ID NO: 8376 - DNA, 3766 bp, Unknown
  gut microbiota DNA sequence
aagcggatgctccgatttcatttccgcagctaaaagtacatctttgaaatgtggttcctgcgactgcgcccataaccatccggtagctgtaggatgcccttcagtcagtgttcccgttttatccagtacaacgacatctactttgcgcatttgttccaaagccactgcatctttaatcagaatatgctggctggcagctttgcctatacccaccatcaatgcagtaggtgtagcaagtcccaaagcacatggacaagcaatgacaagaacagaaacagccgacaaaataccataagagatatattcactaccaccaatggtgacccacaatacaaatgtaagaatggcaatgcccaatacgacaggtacaaaaatccccgtaatacgatcgacaatgcgttgcacgggagctttgctgccctgtgcttcctgcaccatagcgataatacgggcaagcaccgtttcactgcctacctgtgcggcacgaatgataaatgaaccacgctggttaatcgttcctgccaatactttatcacctttcttcttttctaccggaaccggttcaccgctaatcatactctcatcgacatacgaatcgccttcggaaagctgaccgtccacaggtatttgctctcccggacgtacaaccaccaaatcacctacctggagtttttcaatcaagatctcctcctccactccattgcgcagaacacgagccgctttaggctgcattcccatcaacttacgaatggctgttgaggtatttcctttggcacgttcctccatcaactttccggtaagaacgaaagcgataatcaccgcagaagcctcataatagacatgcggttccaatccgcggtcataccagaattcggggaagaaagtgttgaacagactgaacagaaaagcaatggaagtactaagcgcaaccaaagtatccatattactccgtcctaatttagcctgtttccaggctccggtgaagaaaccacctccgaaaaagaccataacagggatagcaagtaccatttgaatctcattagagtatggtacatgcatcagtatcatggaatataccaacaatggtactaccaaaatccacgctccaattaccttccatttcaaacgagtgtaacgcttatgctgttcctcttcccggcgttcttctttgtgggcttcttccacaatcagatcataacctgccgcaagcacagccgcacgaatctctccgggagtcagctgctctttctcataagaaacggtcaatgtattggtagcaaaattaacggaagcctcaatgactcccggcaatttttttactgttttttctacattattggcacatcctgcacaatgcatattaagcacaggaaatgccttttttgttgtgttacccatataattattgtttacggccttcccctcctctcaaaaagaagttggggaagaacccttgtttgtttatagaaacaagctaatacaggtatttgttcaattacttcttatcagccttctgatcgtctttctttgtttcttttacaaattcggcttcataactgaacttattaaaccctgcctgcaacttctttacattcgttttttcagcgtcatacgtaatggttaccattttcgtttttacttcggtcgaaatatccttcagccctttctcaaaacgcatattgtcctttactttcttttcgcatttctcacagtgcatctgcgacactttaaatacaacaacacgaatatcttttgccaatacagctgttacactcaaaagagtcaccacgcaagtggccatccatctttttgttctcatttttcttatcagtttaaaattaatattctttattatgcgatcgtttctttcattcgctatttcctgcttttactcactatttctagctaagttaaaacgtattccgatatatccttttgctccgtgcaccggtccccaaatcatggtagaatcaaagttgttcccccagggatttgccgcatcgataatcggattcttttgtttgaagtttgtcaggttctcgcctcctacgtagatagaccagcggcggaagtaacgggtcacctgcaagctcaactgctcaaaactgccataacgacgttcccaggataactgtccgtctcccagttcataaggagtaggcatcctgccgccgccattcagttgcagtgtggcgtcaaactgccatattcccagcggagtttggtaagaagccgtgagtagtcctttatatttgctggtcagcggtttctccattcgttcacctttgtaggtcgtttttgcatctgtgagccggtaagcacctgtcagagtgaatcctttgaagaaaggataacttgcttccacttggaacacatgcgaataagagcgtccatccaaattgtaaaaagctacttcatggggggtgctatccatatccactatcacttgtttcaggaaatccgtataatagtattctgcattcacattcagcgttttgccgaatatagggatataagtagagacgctggcaccgtaattccacgcttcttccatatccaggttctttgctatttccaccttacgactgctggaaagcaggtagttgttttccgccaacacatgattggtacgatacccttttccggcagaaagacggaaattcacataatcattcggattgtacttaagatgcgcacgcggagtcacgaagaaaccatgttcgttactgtaatcaccacgcagaccggccattaccatccatttatcattcaggttcaacgtatattgcacgtaagcaccgggaacagcttccttttcaaaggttttgagaggattgtccgttgtattttccaaacggtaatgttggtcataagcgtcataattgaagctcaatccagcggagaaactattttgcggattaaattccgtttcaaacatcagcgaagcatagacgttggtttgatccacattatacagtttgcgtccatacgtagcatcctgattgtgtaaagtggtggaaagaatcaaagccaggttcgtattcttctccttattaaagatataggcgttcttggtgaagaattcatagcgttccgtatcaatccctactttatacagatcaccggagtgcattgtccctccgtgattggcctgtccgctggtacgtgtttcagaaagggctttgatacctgcctggaaaacataatggtcgcccatgtatgcccaccggttccacacattatactgttctacctgcggaatatccacaaatccgtcatcgttgccatcatgcgccttggtctcattttcgtaatgcgccagcagagaagtgctccatcgtttggaaagtttcaatgtagcgtccgcattggcttcatatcggttggtagtgcttgcaaaaagattggcagacacccaatcggcttccggcaactgtggtttcttaaattctacgtttatctgtcctgtgatggcttcataaccattcttcaccgaagatgttcctttggagacctgtatgctctgcatccacggaccggggacatatcccaatccataaggagcggcggctccccgataattcggaatgttttccgtcaacatctgcacataagtgccggacagccccaacaatttaatttgttttgctcctgttgccgcatcggaataactcacatctactgaagggttcgtcacaaaactttcacccagattacaacaagcggctctactcaattcggcactgcttatcatgtcttcgttcat

SEQ ID NO: 8377 - DNA, 3185 bp, Unknown
  gut microbiota DNA sequence
gccggaagatagtttttcaataaatcgcgaagcaagaaaaacttttcggtggtccatccggcttcactgatcggagcgtcataatcatacgaactgcacatagcggaataagcagggttgtttgcacctccccaatgaccgaaagtcgttcctccgtgagtcatatagagactgaaagagatattccggtcgagcatatccttgatgccctgtaccatatctttcgcgggacgtgtttcgtgtttacgtccccagtggtcaaaccatccgctccagaactcactacacatcaatggagtttcgggacgaagctctttcagtttcttaaactgctggtcgatattagccccagttccgaaattcacagtccaaatcaaatcgtcgagtgcattattggtaaagttactgctccagtcacattgaaacagaggcacatcggtaaaaccggattcacgaaccaaatcacgtacggcagaaacgtatggtttatcgattccgtaagagccatactcgttctccacttgaaccatgataatgtttcctcctttatccacttgcaacggagccagttgtttgccgacttctttcataaaaatacctacccgttccatataataaggatcaagcgtgcgcaaggctacgtcttttttctttaacagccaccagggaagtcctcccatctcccattccgcacacacatacggaccgggacggacaatgacgtacattccatgttgctgcgcaagtttacagaaagcggcaatatcattctgaccggagaaatcgaactttccttcttcctgttcgtggatattccagaaaatataaatgcaaatcgtattcattcccaatgctttgcacatctctatgcgatgactccagtaagcctgtgggatacgggtataatgcaactccgccgccttcactacaaatggttttccatcaagcaggaatgtgttcttgcccgcctcaaatttgtgggcagtggtttgcgcctgtgcactactaaagagaataactgtaaaaagtaccagtaaagcaatgattttgtttttcatggtttattcaaaaatagaattttaatagtatacggcaaaggtaggcgattcacctaaaaaggagggcataattatcattcaaaaagggttagaaataaagcaaaatagcgccaattggcgctattttgctttatttcatttattcccgatcgcagaaatacctggcagaaacataaccattagtcacaaaaggattattcatatctattgttattgccctaaagatgataaataaaacaccaatggtcaaataatgatagtcataaaacgaccatcattatttgaccattggcctagcactataaaatcagttttcttttgtcagcagactttccaattcttccgcgttcagacgaagataaaattgtccgcgataggctacggagataccgcctgtttcttccgaaacaataattgcatgagcatccgactgttgagagattcccattgctgcgcgatgtcgcaagccaagttctttcggtatattcaaatcatgggatacaggaagaatacatcctgccgccttgatacgttttttactgattaccattgcgccatcgtgcaacggactattcttgaagaatatattttcgattaaacgttggttgatcgccgcatcaatcagctcgcccgtacggacgacttcgtctaaaggaacattatgctctatgacaatcaatgcaccgactttttgtttccccatattcaaacaagccattaccaccggcatgatatcgtcatgcttcaacgactcttttttcgaaccgttaaagagacgggccagtgcgctgacatgtcggtgagatcccaaagtcaagagaaaacggcgtatctcatcctgaaaaagaacaatcaacgcgatcacacccacattcatcaatgtgtcgaaaatagagcccaacaatttcatttccagcacttgcgtcaccaccagccagatcaggataaaaaccagaattccggtgaacaccttgatagaaccggaagctttcatcaatttgtaggtatagtacaaaacaaaagctaccagcagaatatcaataaaatcttttatgccaaactcaaaaaacatgcaccctcctcttatttgtcatatccactctctatttttaatttctctgtgatccggacagcttccaccgcttcacgcacatcatgcacccgcaggatatgcgctcctttcattaacgcaacagtgtccaatacggttgtcccgttcaatgaatcttgcggagttcctcccaacaatttataaatcattgattttcgtgaaactcccactaaaacaggaagttcgaagatatgaaactcttccagatgtgccaatagttcataattatgttccagtgtctttccgaatccgaatcccgggtcgagaatgatatctttcactcccaagtcgcgaagttgctgcactttacgggcgaaatacaggaaaacatcttttatcagattatcataagacggttctttctgcatattttggggagttccctgcatgtgcatcattatataaggtactcccaagtcggctactgtctgaaacatccggtgatccatttcaccggcagctatgtcattaataatagccactccatattctttcacacattcttccgccacatcagcccgaaaagtatcaacggaaataatggcttcgggatgattacgattcagaatctccaaaccggtgcgcagtcttcgcatctcttcttcagcagaaatatgttcggcattcgatcgtgaagaataggctcctatatcaattatcgaagcaccttcatcaagtatctgccgggcccgggcagcaatgtcttcttcagtctgcatccggctgccggaataaaaagaatcgggagtaacatttaaaattcccatcacctgcggagtagcaagatcgagcaaccgcccttttacatttatataaataggagacataggtttcatcattgacaacattccttttagatcgcctacaaatgtagataaaaaaagcaagtattcgtactaaaaagaagaaataaacgtatatttgcaaactatagaagaacccgaaaaattcataccatgagccgattaaccctatttcgcgtaggatttcttttcctcattttgttctttaccact

SEQ ID NO: 8378 - DNA, 1168 bp, Unknown
  gut microbiota DNA sequence
taatatatcttcgtaatcaggaagatcgtcacaacttaaagcgggcaaaggtgcacactcccctattcccactctgccagggaagtcaggagaggtaaaatgaagataccaaactttacgcgtagtatatgttcctctggaagtcccggcaggttgcttgaaatggagcaatcggggaataatttctattttacaattcatcgtgaataatttttcaattcaccacagaataacacagagcctcacgaagttttaacaagttatatctcttgcagttctcctaccattctctcctccacagtcttgctttgcagaaaatcgggcttaaacgcaggaaaagcaaactctgtggtactctgtggcaaagccgattttaagggaatttcggatattgtttgaagttcggtttacgtttctccagaaacgcattctttccttcctgtgcttcatcagtcaggtaatagagcaacgttgcgtcacctgccaattcctgaatacctgcctgaccatccagttcggcattcaatcctgctttaatcatgcgcaaagccaacggactaagcaacatcatttcttctgcccactgtacatattcgtcctccaactgctccaaaggaactactttattcactaatcccatgtccaatgcttcctgtgcattatacttccggcagaggaaccagatttcgcgcgctttcttctgccccactacacgtgccagatatgacgcaccgaatccggcatcaaagctacctacacgaggacccgtctgaccgaaaatagcattttccgacgcaatggacaaatcacataccacatgaagcacatgtccgccaccaatagcaaaaccgttcacggcagcaatcaccggtttcgggatgctgcgaatctgcttttgcacatccaatacgcttagacgaggcacaccgtcttttccgatatatccgccacgtcctttcacattctggtcgccacccgaacaaaacgccttatcaccggctccggtaatcacaatcacatcaatatccgcttcttcacggcagatgcgcaatgcgtcactcatttcagcagtagttgtcggagtaaacgcattccgatagcgctcacggttgatcgtgatacgggcaattccattataataatcaaaaagaatatcgtcgtattctct

SEQ ID NO: 8379 - DNA, 2127 bp, Unknown
  gut microbiota DNA sequence
gtgttaaagtctgaaagtatctacattgatatcctgaaatccggaggatcggcaccgttcatcggcacgatgataaattttccggacggccgtatttttacggaggatcatcttgttccgcgcctggaagcggggcagtacgaacaggtgaaatttgactttgtggcttatgatcccgccgcgacgccagccaaagtggacgtttaccgggacggggtgaaaacgcagtctatcagtgtggcccgtactacgcagacatataccaaccgttttacccagcagggtgaaatcaatatgaaatttaagacgggagccacggaatacccgttttatatcgacgtgacggaaagcggcatcgacttgcaagaaactactgccgggcttgtactgaaactttcggcagccgggcggagtaacagtgaatccgatccgggagcctgggattatggcgacatacatacaacgtttgcaggtttcgactggaacagcaacggctggacgggtgacgccctgaaacttacaggaggcgcgaagattgaaatcgggtaccagccgttctccacagatgcaaccactactggggctacctatgaaatggaaattctttgttcgtcggtaacggaccggcagggggtgatactggactgtatggccggcgatatcggtttccaaatgacaacggagcaggcccttatgcgtgtttctggcggaacggaagtaagtacaaagtttgcaagtgatatgaacctgaaaatagcctttattgtcgggtccaaggctggcaaacggttgctggaactttatgtaaacggaatccgttgcggggcggtgcagtatggggctaccgaaggactactacaggcggaaccggtgaacatccgtttgttcagtgatacggcggatgtggagatcaggaatttccgtatttataaccgtgcgcttacggatgatgaagaattaaataattacatggtagaccggatgacatcggacgaaatggtcctgttatttgaaaagaacgatgttacgggggacaacggtacggatatcgacatagacaagctacgcgcccagggaaaggcggttatgcggatcgtcggcgacgtgaaccttgtcaacgctaccaataacaagaaattcgaggtcccggtcgatatctatttttatagcccgtacggtaaggagtatgattttgtagcaaggaatgtcggtctaagaatacagggtacatcatctaccacttatccgcgtaagaattaccgtctttatttcttgcgcctggagaaatacggtaccacgctggaagttaacggcgtggatgtgccgtctcttgaatacagtttcaaaccgggagcacggccaatcagtatattctgtttgaaagcggacttttccgattcttccggtacacataataccggtgcggtgcgtattgtgaatgacatttggaagaagtgcgggtggctgacaccgccgcaggctgcatataagggggaatatgacgtacgtataggcgtagacggtttccctatggacctgttttatgataacgacggcaccggtgcaaatacttatctgggaaaatacaatttcaataatgagaagtcggaaagtgcgattatttacggttttgaaggaattgaaggattcaacgacgaagcgtccctgaatgggcagcgtaacaaatgtatttgtctggagttcctgaataactccgaggccctttgtttgttcgggactaccgacatgtcttcttttgatgatgcgctggaatttcgtttcaaggcagatactacctgggcggatgcacacgaggacgataaggcggcagttataagactttggaactggatagattcatgtaaagacgatcccgccaagttcctggaggagtataaccagtatttcggtaatgacagcccgtttgcatggtatctgattaccgattactttatggccgtggataaccgggcaaaaaatatgatgctggcgacctgggactctctgatctggtatttccttccttacgatatggacacgttgttcggtgtgcgtaatgattcggtactgaaatacgaatataccattacccatgcaagttttgacgatagtatcggtagttatgct

SEQ ID NO: 8380 - DNA, 675 bp, Unknown
  gut microbiota DNA sequence
ccggagttgaacaggatagaggcgtggaagatggtttcataaaaggctttctgctgttcccggtgacgctggcacatatagataaagtcgctccggaatttgcgttccttgatgagttgctccagttgttgcatattgaaggagtcgtccaggaaactgtaaaactcgtcccattggtcgactacccgtttccagctcgcccatccccagatggaaaaggtggtggcgaagaaatagtcggatggcatatcctgggtgatttcttcggggttgaatccggcaatcatgctgatgcgggtgtcgtgttcgtatttatccagcatctccttgcagaattggaaaaaggagacggagggcacatcgtcgtcttccaatacgatgcacttgtcgactttggagaaggcccatttctgcgaaatgtactccgaagggtcgcagccgaaattcttttcctgataaagccgttctacttcacattcccagtctatctgtgatacgatttcacggcaggcttctattccgggcaggtcacgttcgtttcgtgctccgtcctgatagaggaagaggcgggacggacgcgctttcttcacttgctcgaacacttgcgacaactgttgcgggcggttgaagaacaggataagtaccgggacgtctactaaagcggatttcatattc

SEQ ID NO: 8381 - DNA, 819 bp, Unknown
  gut microbiota DNA sequence
aaatatgcatcgaaaaaagctctcgaggtgttgaaacagaagcctatccgacttcctgcttgggatcctatgtttgctgaatagttctttttctttcgtcttgatacgaaagaaaaagaaccaaaaagaaagaatcaaggctgcgtttttccggctactccggtgcttcctccggctaaagggcagaaactcgctacgctcaaacagtctgcccttcttaacgccgaaggaaacacctgcgcttgacgccggaaaaacgaggccggggaacccgtgcggcgtggcggcctttggtatacggaggattgcattgttttaaaggacggatagcatggaaaactttgctaaataaaaggttttagttctgcagtgtggaaggattcatagcatacaaaacttcgctaaataagaggttttgcagcatgaagaactttcagcataaaaagcacattatctaaagaactttacatattacaaatgctactaataaaaatgctttgttatataaaagccgtagacgttatacgactaaatatagcaaagctgaataatatataatagagatatagaatacgagataatagagatagtagagatagaaaaatagaaagatacagagagttccttcctaatacccctcacgaacatcatacagcgaaccagccggcggctttctccggcctacttttttctccgtcaggcgagcgcccgtaacgtagcgttaagaagggcagactgtttgagcgtagcgagtttctgccctttagcgaagtgaaggaagcgagtaggagaaaaaagtcagccttgaatttttctttg

SEQ ID NO: 8382 - DNA, 1926 bp, Unknown
  gut microbiota DNA sequence
tgtaaggattggctatggagcgagcgaataatataatggctgtttcctgatgaaataggaattatacctgaagaaactgtaattaataaaggtgcgttctaactctaatgaaggtaaggtagttgaaataaatatcttaccttctgcagattgtttagaacccatataatcagttacgcctgttttccttattgattcgttataagccgtttctacattatattcatattagataagagtgttttatttttcaatggcatagtgttatcttattctatattaaaaagcggcaataggacgtacgtagtaaggcgtcgatatataggactgcgcggtgctcgtgcttaccaaacctacactccacgaatctccacttccattttggacggattgccaatatctgcccgaattataattagtgaaaacagtttttttgattaactctcctcttgtatttctcaactccagcatctgtcctccggctgggaaaaaccatccgctggttttagcatctgcggcaggcgagtagctgatacatgcattagcagccggataattacctataccatcggctttgagtaattgtgttatcttaaatccattaaaatatccgtacggactacttccgttacgattggaatccaaagcgaacttcttgttcccccacttgatggctgctccattatttgcatctttcagtgccactgtatatccattaatgttagtcatcggctctccgttaccattgacatattcactatcatccgctgtaaatcgccccaccttgaagacaagcccgatgtaagttcctttgataatggatgtttcgcccggaataatcttaccatcgctacaaaaatagtcgcccacctgcagcgcccgggttatgcttccgtcggtatagaccgctgtttccacctgctgagtgtagtatttcccggcagcgagctttccggctgttagtgaggtccccgtatatagaatcgttttgtcacctttcgttagataactcccggcaggcacaaagtcgcctgccggggaaggtacgatggcacgaaacgttccgtcgtccatacgcagggctttgatgccgtttatagtagcgtctttggcagtaacgtccagcctcagtaccccaccggcatactcaaagcttgctcctgccgggggaacgcaattaactaatcccatcggtttgagtaccagcaacgcatgcagatgttcaaacttcagcgtgagcaccttcttattcgcatttgccgggtctaccgtggggctggcaacggctgccatcaggtcgctgccggtataggcggcggaggtggactggtcagcggccggttgcagtttagcgttgtttgccaggtctttgaggatttccgctttattgtcttgtttgattgtaatgccgtcccgataaggatagtatgccacataggcgagattgtcgtcgtagctgtacaatgcgtgtgtatcaccggtggcaggtgcccaactgcccgttccgtccgctgcttttgtataaaccagtttgaggttgtacacaccatcgatagcggctacattgggcgtttcaaaattcctgagggcgaagatgccgatggcatcaccatcggaaaattctgtggtataaccgttctcgattggcgtgcgggtgacggaggtgttttttttatcaatggcggtgtaactactcaccgttgcactgatggtaagagggatgcggcgatctgtatttccgatgttctccatacctgcctcgtccgtacaaccacctccaaggataaggaaggtatagagacaaatattagacaagaatgttttgttttttaacggcatagtgttctcttatttattgtaaaataatttttatagatggattaaaatactaaggtggtacgtaatagattcgtcaaacataaactt

SEQ ID NO: 8383 - DNA, 1002 bp, Unknown
  gut microbiota DNA sequence
gctgtttcgtcaaactcacggcggggctggttgggattgacagtaatctttgccagctctatttcattaatggaagaagacccttcggttttcacatcatccattgagagcaaggcgtcgagaccacgtcctaatgcatttcttttttgtgttgccatatcttcttctttcttttatttatttcggttgataatctctttagcaagagccaggtggtttttggcgccggtagattccgcatcgtaaaggatggtcgggacaccgtagctgggagcctcgctcaatttcacatttcgttgaataacggtgttgaacaccagttcctggaaatgacgtttcacttcgtcgtaaatctgattagcctgacgcagacgagagtcatacattgtcagtaagaaaccttcgatttctaaagccggattcagtttcgacttgatgattttgatggtattcaacaatttgctgataccttcaagagcaaaatattcagcttgaacggggataatcacggagtcggctgccgtcagggcattgatcgtgatcagtcctaatgaaggcgaacagtctatcaggatatagtcatattctttcttcaaaggtgtgagtacttcttttagtatcttttctcggtttgggaggttcagcatttcaatctctgctcctacgagattgatgtgcgaagagattactttcaaagaatcaatctccgtatcaaggatagcgtcctgtacgttggctctgtcaataatacattcatagatagtgcattccgactgcttgatgtctactcccagaccggaagaggcattagcttgcgggtcggcatctactacgagtacctttttttccagtgtagcaagtgaagctgcgagattaatcgtagtcgttgtctttcctacaccgcctttttgattggccaaagcaataatttttcccatattctctaaatttattggcagcgaaataagtgataaatccttagagcgcctacgaaaaaagaga

SEQ ID NO: 8384 - DNA, 316 bp, Unknown
  gut microbiota DNA sequence
gtaggggtcatgatggacgatgttttggcgggagtgtatagttttattttgttagtgggagcgagatgggtgattggctgaaaaaagttgcacggatgatttcccagaaaggcggcatcttcatgttcttgagggcgcagctttctgctcaaatggcaactattgcagactttctcgttacgattcttctggtcaggctgtttgatgtctactatgtatatgccaccctggcgggagctatctatggaggaatcgttaattgcgttatcaactataaatggacttttaaatcgaaaggaaagaaaacacacgttgc

SEQ ID NO: 8385 - DNA, 967 bp, Unknown
  gut microbiota DNA sequence
aaaatctattaccgaacgaataaccgaacctttcccgtttcccctctgtcgcccggcgtacttccggctctttcctcgcagaactttctaaacgcttcgacattcccagatgatagaataaactcggtcgctatttctttcgctgtcatctcctcggtcacccgtctatataaacgcctcatctctgcatcttgattaaccacccggtaaaacaaaccttgcgcctctatggcgttattatatccctgtaatatcagattatgtatttcgtcgtatggattatcaaaccccgccaacataataggggcgatgtcacatgccgcgctcatacattctttttggtgtgctttccggttcttcttaaatcgttctaaccgttcctgctgtaattcggttacactctccttagtgcaccccatatagccgccgtttgcatctcctagatgaattgtgtttctatcaagttgcatacctttcaccgggcgaccgtccgcgcccaaaataactacttcttccatgattttatattttgttagatgtgaataaatcgagtttataagatgagactacacacagcacaagccccgttatattcggtgcggctgtctccgcttccgtggcaaatagcaggaccgcgcccgctattagcccgagtaaataaatcgctttcatagtgagtaacttaataattcggcttgtatactaattaacttcattacattagaagtaatcagaccggagcgaattatgccgttatcttcccgtagacacccgaatagattctttataattcccgcatttgctaaattcgcctcgcaactaacagttattcgccacatgcccgaatcctgtttaatactgatttctagttctttcatttgaatatgtatttagttcgttaataatcaatcaccgcaataatttccccatccgctaaaagatgaataatgctcgccgcgaccgtaac

SEQ ID NO: 8386 - DNA, 2652 bp, Unknown
  gut microbiota DNA sequence
gagaacacctccgatatgctggaagaccatccgagtactcaagacctcgcacgtggtaatcaggttttcggacgtaacatttttaatacccgtaacctgacttttgaacctagtgtcaacatcgccacccctttaaattaccgtctcggtcccggtgatgaagtgattatcgatatctggggagccagtcagaacactatccgccaacagatttctcctgatggcacgatcaacattcagaaaataggtcccgttaacctgaatggtctgactatttctgaagccaatgactatctcaagaaaacattaaacaagatatataatggtcttaataatacgaatgatcccacttctgacatccgtctgactttggggagcatccgtactatccagatcaatgtgatgggtgaagtagtccagccgggcacttactctctttcttccttttctactgtcttccatgcactttaccgtgcaggaggtgtgagtgacataggtagccttcgtaatgtccagctggtacgtaacggcaaaaacatcgccacaattgacgtctaccaatttatcatgaaaggccacattcaggatgacattcgtctgcaggaaggtgatgtcgtgattgttcccgcctatgacgtattggttaagatcgatggaaaagtgaaacgccccatgcgtttcgaaatgaagaaggacgaaaacttatctacgcttatcagttatgctggtggatttgaggccgacgcctacacccgttccttgcgtgtcgtacgccaaaacggacaggaatatgaagtaaacacggttaaagaccttgattatagtgtctataaaatgcggaatggtgatgttgtgaccgccgaggctatccttaaccgcttcactaataagcttgaaatccgtggagctgtttaccgtcccggtatctaccagctaaacggtaaactgaataccgtccgtgaactggtgaacgaagcccaaggtttgacgggtgatgctttcttgaaccgtgctgtcctttatcgtcagcgtgaagaccttactactgaagttgtccctgtagatatcaaggccatcatggatggtacttctcaaaatatcatcctggcgaaaaacgatattctttatattcccagtatccatgatttggaagataggggagatgttgtaatccacggcgaagtggccaaacctgattcctatccttatgctgataacatgacccttgaagatttgatcattcaggcaggtggattgcgtgaagccgcttctgtagttcgtgtggatgtatcccgtagaattaagaatcctcgtagtacagcggataatgatactatcggtcggatatatacattctccctgaaagaaggctttgttgttgacggtacaccgggtttcgttcttcaaccttatgatgaggtttatgttcgtcgtagtccgggttatcaggcccaacagaatgtagccgttgaaggtgaaatcctgttcggagggtcttacgccatgactagtcgtgaagaacgtctttcagatttgatcaataaagcgggaggtgctacgaattatgcctatttacgtggtgcaaagttaacccgtatagctaatgcaagtgaaaagaaacgtatgggtgatgtaatccgcctaatgagtagacagttgggagaagctatgattgactctttaggtattcgtgtagaagatcattttacagtcggaattgatttggaaaaagcactggccaatcctggcagtacagcagatattgtcttgcgtgagggggacgtgatttccattccgaagaacaataatacggtcacgatcaatggtgctgtgatggttccaaatacagtttcttatataaagggtgagaatatagattattacctgaatcaggctggtggttattctgaaaatgcaaagaagagtaagaaatttatcgtatacatgaatggccaggtaactaaagtgaagggtagcggtaagaaacagattgaaccgggttgcgagataattgtacctagtaaggctaagaaaaggaataatattggcaacattttaggttatgctactacattcagtactttgggaatgatggttgcttctattgctaatttaatcaagaaataacgaatacctttatttatgtctactttgatggaacaaacatctgaaaaggaaacaaaacagttgcataataatcacaatgatgaggagatcgaaatcgatttgatggatctttttcgtaaggttataggtattcgtaagaagatctataaagcggccggtatcggactgataattggtgttattgttgcaataagtatccctaagcagtacacggttgaagttaccctttctccggaaatgggtaataacaagggtggtggtttatccggtttggctgcttcctttttaggaagtggagtttctatgggtgaaggaactgatgctttgaacgcttctttgtctgctgatattgtctcttctactcccttcttgttggaactttctaatataaaagtacctgtatcagggagtgagaaaatctctttaagttcttatttagatgaagaatcttctccctggtggagttatgtaatcgggtttcctggtatggtaattggcggagtaaagtctttgtttatcgaagat

SEQ ID NO: 8387 - DNA, 996 bp, Unknown
  gut microbiota DNA sequence
gtattccaacaatacatgaaccaggcacaaacatttgccaacaactttccacgggagaaggcgtatttgcattttgacaatacgagttattacgtcggagatacgatctggttcaaggcttatgtcactcttgctgaacaacagactttcagtcagatcagtcgtcctctatatgtagagttggtagaccagacagggcatatagcagataaacaaatcatcaaactgacacagggagaaggaaacggacaattcattcttcccccttccatgttatccggctattacgaggtacgtgcctatacccgctggatgcttgcttttaatgaaccacagtacttttcgcgcacttttcctatttatcaactgacaaatagtgataagctggaacgtagtatcacgacttacgaacttagttcgtcgatggagaaccgtccgtcggaaacagaggagaagttaaatgtacgctttttccctgaaggaggacaattagtggagggggtgacttcgcaagtggctttcaaggcggagagtaaaaatgaagggaatatcgaattatcgggaacgatctataccaaagaaggggcagaaatcacttctttcgagactttgcacgatggaatggggcgttttgaatatacgccttcagctcaacctgcgattgctaaagtcgattttcaaggaaagaaatatgaatttacccttccacaggcattgcctaacgggtatgttttgagcactgtcagtaatgccggtgcccttttggtgagagttttctgtaatgccgctactcctcaagatacactggctgtatttatcagtcatcagggacgcccgtatgttcatcaattgattagttgccggtcggatgctccgcaggagtttattctacccacccgtaagctaccggcaggcgtactgcaagtcagcctcatcaaccgggcaggcaatacattgtgcgaacgttttgtctttgccaatccgcgtgctcccctg

SEQ ID NO: 8388 - DNA, 1650 bp, Unknown
  gut microbiota DNA sequence
gtattggcttcagattcattgaacatgttatgctgacgttcatacatcaacagatttgtttctgcgttgaaacgcagtggtgcagtctcatcagtgaaatgaatgcccgcatggaagtcaccggatgtgaatttctgcttgctgtttacgctttccggttggaagttgaagttgctcaatccgaagtttccggcaatatttaagtccagtttattaaattggtgtgtgtaatctacatttgcgcgtgtgcgataataaaatgcattccatttttctccatctgtgaagggaagagttaacttaccatccattccatccatttggaaacgtacattcaatttgtctttctgcgacagacggaatagataattggcaagaatatccaaattgccataattaccatatccggcacgtacatatcccggggtagtgccgggttgaacttcttttccggtataggggcgcatcaggcctgccggaacggaagtggccggaaagaatgttgtagcatactctacttctttcttgctcactgtcggttcttctactttaggcaggacgtttactttcgaggcgtccataatgtccgggttatattcttgttccacaacgaccgtgcgggtcattgtggtatccttcggttgggtggtttgggcttgaaggctggatggcattgacatagccaatgcgagtcctcctattatataatgagatcgtttcatacttttctattttttaattctcaattctcaactttcaatttactaagtctgctttcaatcatgctttcaatatcgtcattcccttgataattttgttgcagacttagcagatattggcgtgcgtccagatctttacccgtagcatgatagacgtcggatagaaggataaaactgcgcgctagccaataagcatgtggcgtactctgttctatatagttgagcaactctttctctgcagcggcatattcttttgcgtcgtagagagattgtgcaacttgatatttagcttcggcaccgtaagagttgcgcgtgtctttggccagttcacgatagtcttccattgctttcttgtcagccttttgcttggtataggctttagcacggtaataaagagcttcatttcttagctccggactaagtttggcttctgcaagcaggtcggtagctgcatggatggtttttatgtcatctcgcaataggaaggcgcaacgcagaatacccgtttcagcaagttggcggcgctctacgttggttgctttttctttcagcattttgtagctagccaatgcttcagccatattttgctggttgaattgcacttcagcacgcaagatcagtgcttcttctgcaaacggattgttaggatattccagcagtttaccggaatggagaagaatcatatcataatttttctgctcgtttccgatcaggcagagataataatgtgcgttcaggctgaaggctccttccgggaaagtttgcaggtatttgttgaggcttgttttggcttcttccattctgcctcgtgcataaatcttttctgcggcggcatacgtaagcgagtcttgttcgttagcatcgaaacggatgtgtcctggcatggcatttgctaaagcagcaaattcgtcgatgcggttgagatccacat

SEQ ID NO: 8389 - DNA, 1370 bp, Unknown
  gut microbiota DNA sequence
cagttcgtatgattatgacgctccgatcagtgaagccggatggaccaccgaaaagtttttcttgcttcgcgatttattgaaaaactatcttccggccggtgaatcattgcctgaactccccgctgctttgcctgttattgagattcccgaaattcattttaataaagtggctccactattctcgaatttgccggaagccaaacaaacagtggatattcaaccgatggaacaattcaatcagggatggggaactattctgtatcggaccacactgtctgaagcgacccccgcaggaaccgttttgaagattacggaagtgcacgactgggcgcaaatctatgccgacggcaaacttctggcgcgtttggaccgtcgcaaaggagaatttactacgactttacccgcactgaaaaaaggtacgcaactggatattctggtggaagcaatgggacgtgtcaactttgacaaatccatccacgaccgcaaaggtattacagaaaaggtggaactagtttcgggtaaccaggctaaggaattgaaaaactggactgtgtacaacttcccggtagattattcttttattaaagacaagaaatataacgatacaaaaatactaccggctatgcctgcttactacaagagcacttttaaactggataaagtaggagatacatttctggatatgagcacatggggtaaaggtatggtttgggtgaatggtcatgcaatggggcgtttctgggaaatcggtccgcaacagaccctctttatgccgggttgctggctcaaagaaggagagaatgaaattctcgtattggatttgaaaggtccagccaaggcttctatcaaaggcttgaagaaacctattcttgatgtgcttcgtgaaaaagctcccgaaacacaccgcaaggatggagaaaaactgaaactggcaggtgagaaagtaatacatgaaggtgctttcactccgggcaacggctggcaggaagtacgatttgctgctccggcaaaaggacgttatttctgtctggaagcactttctccgcaagcaaatgataacatcgcagcagtggcagagttcgatgttctgggagccgatggcaaaccggtatctcgtgagcattggaaaattcgttatgccgatagcgaagaaacgcgtagcggcaaccgtacagccgacaagatattcgacttgcaggaatctactttctggatgactgtggataatgttccttatcctcatcaattggtgattgacttgagtaaagtggaaatagtgaccggcttccgctatctgccccgtgccgaaaaagaatatccgggcatgattaaagaatatagaatattcattaaaaaagaggatttttaat

SEQ ID NO: 8390 - DNA, 210 bp, Unknown
  gut microbiota DNA sequence
gcgtgattatctaagtaattcttttaaaaaagcaccgaactcagcggttatgcgagtaccggtggctaccaaactccagtcacgactatatgtctgtccagtggatggatctttccagcgacgacgcttgatacgtaaataaacggctttaccacggatagggaagtcctgaacttcaatctcagggaggaaaccttttgagtgaagatg

SEQ ID NO: 8391 - DNA, 610 bp, Unknown
  gut microbiota DNA sequence
cttgcgtggactgtcgtatttatatttagtacgcaactttcgggaagttcctttgattactgaaccttatgtagacgatgccatgcctactgacgtgccaaagtcttccgaagtggagattctggaacaaattaaaagtgatgtacgtgcagcattggcaactgatgccgctaaagaaacatttaacggaacatgggctactaaaggacgtgctaccaaatgggctctatatgcactaatggcggaaacctgtctttgggcggaagattatgaagaatgtgttacatacgctgattacttgattaactccacagctcccatacgtcccgtgtttatgtcaacacctggacaatggtacaatatgttttatcctggtaatagtaatgaatctatctttgagatacagtatgacgaaacgaattatgcacaaggaggcggaagtccgtcaaaacttcttccttatggctctgatgtcacggtcaatacttatatgtattcagaaccgatgactatccgcttgataaatgaattctaccaaaatcaggatgaagtaaatcgtacctattatggttcgtttgctggtataacttataccagctatccggaaaat

SEQ ID NO: 8392 - DNA, 623 bp, Unknown
  gut microbiota DNA sequence
ctccgcgatgtttaacgggtgcaaaggtacggctttttttgaaacaaacaaataattcgctgaatatttttcgaataaatcatcacttttttcttattaggttgagaatgaacgaaataatgatgaaactttttcttagcacctattaatatacaaatgttaatattctctctgttttcttgtatggtctaaagaaaagaattacttttgctcaaaatattcagcaatgtgcaatttgtaacctatgaccgtatccaagacaaaagccaagttagtagatgtagcccgtcagctttttgcgaagatgggggtagaaaatacgactatgaacgatatcgctcttgcttctaaaaaagggagacgaacgctctatacttattttaaaagtaaggatgaaatctatttggctgttgtggaatcggaattggatatattgtcggatatgatgaagcgggtagccgagaaaaacatttctccggacgaaaaactgctggagttgatatatacccgattagatgcagtgaaagaggtggtctatcggaacgggacgttgcgtgctaactttttccgtgatatatggcgggtggagaaggtgcgtaagaaattcgacgcaaaggaaatac

SEQ ID NO: 8393 - DNA, 601 bp, Unknown
  gut microbiota DNA sequence
aaaacggactttgtcccaagatagcataagttcctgtcagccatgaggctgcgtccgcttcattcttgaagtagttttcaggagtagtgtacgtcggatctttctccaggaaatcgcaggaagtcaggttaagtccgacaagaagtgatatgatgattatctttattgttttcatatacgtaattgtttgaaggatgattgattagaaacctaagtttataccaaaactgatagagtaggctctcggataagcggagaagtccagtcccggagtcagtgcgccttcacggatcgatacttccgggtcataaccggaatatcctgtacatgtccatagattttgaccggcaacgaatacacgtgcattgtctatcttccatttcttggtcagttgtttcggcagtgtatatcctaaagatacggttttcagacgaaggaaagagccatcttcgataatgcgtgtagagaacactttgttagaaccggagtcggtagctctcggaatattactattcggattttctggtgtccagcggtctgcgtaacttgcatattgattcaagtcgcgtgccttattgctattttcgaagaataagcggtt

SEQ ID NO: 8394 - DNA, 357 bp, Unknown
  gut microbiota DNA sequence
ttcagtttcactttagttgctttccgtttggtacttatcgttacgggttccgtagtggtcaggcacggatggaaataaccgatgccgttcagatgaacttggcgtccttccgccaattcctgtcccatgatgtgcgaaagcgcatcaagtacggctgtgacgtctgtttctgtcagtgagcaacgttcctgaatacggcggcgtagtacgtcggtccctatggaaccgttgtatttgatgcgtggatgcagggtgttttcgttttcttcctgctgtttgtttgaaggcttcgggtcttcataccaatcgaataatattgccatagctctatatttcctctatgaaaagcaagaccgc

SEQ ID NO: 8395 - DNA, 1903 bp, Unknown
  gut microbiota DNA sequence
aactaactatatttataccatgaacatgaaaaagaattttctaacaatgctgcttgcattggctttatgcagttcgacttttgctcaatggaaacctgccggtgacaaaatcaaaacatcgtggggagaacagcttgaccctaaaaacgtattgccggaatatccgcgtcctatcatggagcgcaacgactggaaaaacctgaacgggctttggaaatatgcaatcactcccaaaggtactcctgcacctgctgcttaccaaggcgatattcttgttccttttgccgtagaatcgtctttatcaggcgtaggcaaaatgataaacgagaaagaagaactgtggtaccaacgtactttcgacgttccttctgcctggcgtggtaaacaaatcctgttgcatttcggagcagtagactggaaagcagaagtttgggtgaatgatgtaaaagtaggtgaacacacaggcggatttactcctttctatttcgatattacttctgtacttaataaaggaaataatgacctggtagtaaaagtatgggacccttcagatcgtggcgaacaacccagaggaaagcaaatagcaaatcctcatggcatttggtacactccggttacaggtatctggcaaacagtgtggttggaaccagtagcaacacaatacatcactaatctgaaaactactcctgatattgacaataattctgttaaggtagaagttgctgccaatacaacttctgcagataaagtagaagtaaaagtattcgatggcaagaaccttgtagccaaaggcgcagcgttgaacggagtacctgttgaactggcaatgccggctaatgctaaactgtggtctccggactctcctttcctctacaatatggaagtgactctgtataaagacggaaaagcaatagaccaggtaaagagttatacggctatgcgtaaatattctatccgcaaaggtcagaatggcatcactcgcctgcaattgaacaacaaagactatttccagttcggtccgctcgaccagggatggtggcctgacggtttgtatactgcaccgacagacgaagcattggtttatgacttgaagaagacgaaagattttggctacaacatggtacgtaagcacgtcaaagtagaacctgcacgctggtacactcattgcgaccaattaggattgatcgtatggcaagatatgccgaacggtggtcctagcccacagtggcaggcacgcaactactttaacggcagagaagtgattcgttctgctgcttcggaagctaactatcgcaaagagtggaaagaaatcatcgactgtctgtattcttatccgagtatcgccgtatgggttcctttcaatgaagcatggggacaattcaagactccggaaatcgtagcatggaccaaagaatacgatcctagccgcctggtgaaccctgccagtggtggtaatcactatacttgtggcgatattctcgaccttcaccactatccgggcccgaacatgttcctttacgatccgagacgcgctaccgtattgggtgaatatggaggtatcggcttggtagtagaaggaaacacttgggtgaatgacaagaaaaactggggttatgtgaagttcaatacatcggacgaagtaacgaacgaatacattaagtatggcaaacatctgttggaattgatccagaaaggattctctgctgccgtatatacccagacaacagacgtagaaggtgaaatcaacggtctgatgacttatgaccgtaaagttatcaagatgaatgaagctaaagtcagagaaatcaaccaacagatctgtaactctctgaataaataggaaatagcaaattaaataaatactcttttccttgttgaatatcaagacagcacctttgaattt

SEQ ID NO: 8396 - DNA, 1044 bp, Unknown
  gut microbiota DNA sequence
acagaattcaatttcttctgcgatgtctacgcccaatatcttcccgaagggataaaggaagaaatgaataagaaaaaaggagccgtagagcaactgaattatctatataaagaatgtatcaagaccaatcagcagatttatctgttcattgacgaatacgaccattttacaaacaaaatcttatcagaaccttcctgtttggaagattacaagagcgagacatacggaacaggttatctacgcagtttcttcgatacggtgaaagcaggcacggactccactatcaaacgttgcttcgtgacaggtgtcagccccgttacaatggacgatctcaccagcggattcaatatcggaaccaattattcgctctctccggaatttaatgaaatgaccggattcaacgaagaagaggtacgcgcaatgctggattattatgccactacctgccagtttcaccactctaccaacgagctgatagaagctatgaaaccttggtatgacaactactgtttttcagagaaaagttatggcggtactacaatgtataactccaatatggtactctactttgtggataattacatccgaaacggaggagaaatgcccgataagatggtagaagaaaacatccgcgtggattacaacaaactacgaatgttgatccgcaaggacaaagaatttgctcatgacgcctcaactatccagacattggtgcaacaaggatacatcaccggtgaattgaaaactggcttccctgccgaaacaattgcagaaccggataactttatcagcctattattctatttcggaatgttgactatcagcggtactaaacgaggcaagacattattgaccattcccaatcaagtagtacgtgagcaactgtacagttacttactagatacttacaacgaagcggacctccgctttgacaactgggaaaaagggaaactggcatccgctatggcttatcgtggcgactggaaagcctacttcgactatatcgccgaatgtctgcaccgatattcttcccagagagacaag

SEQ ID NO: 8397 - DNA, 1692 bp, Unknown
  gut microbiota DNA sequence
ccacggagttccgtgtgcattcgagtagttagcttcacattgcagcataatggaaggtttgttccaacgacgactcggcatatcacaggcttcacgtccgcgtaccacttgtgtaaaatacttctgaccactgaacagtatttcaatatcttcatgcagacggccaccaccgttgaaacgggtatcaatcacaatgccttcgcagttgttatattttccaagaatgtccgagtatacagtacggaagctgtcatctcccatcgactgaatatgaacatatcccaaacgtcctttcgaccatttttcaacatctgccgcacgttgttttacccaacgtttgtataacaatccattcagttgcccgttggtgaccggcatcaccacttcttcccaacgctctttactttgtggattgtagattgaaatcaatgttttcttccctgctttattattcagcaagcaggttatgtcattatcgagagttatctcttctccattaatcttttcaatgatgcaaccagcctttactttggtacgtgaatgatcgaacggacctttttctattatttcagcaatctgcattccttttccctgataattccagtcgaacaagagtccgagattagaagtgacatctccttttcctttgggagaataacgtcctccggtatgtgaaacattcagctcacccaaccactcactcaataattctgcaaagtcataattgttatcaatatgaggcaggaacttacgataagcattagtcatagcatcccagtcaaccccgtgcatattgacattgtagaagcgtttttgatgctgtttgtacacatggtcaaacatcgtttcacgttcggcagccaaatccattttcatttcagcctgatagctgatggacttcaacgcatccgacttggcatccatcttttgcataatccggcttcccaacaaaaagatatctccttttttgtccaacatcaacgatgcccaaccggtattgagtttgtgcagacgcttcgtatctttttcacggagattcattttccaaaggtcatatccatcttcgaacgcagagaaatagtaaagatcttccccgtcttttgaaagtatggcactacccaagtcggatgaattgggagtcagacgtacgatacggtcttcaatgccgttcagctcgacaagtatctctttttggtctgccttatcctcgtcgatcttgtctttgtcagcatttcctttatctgctttttccgccttagacttctttccgtctttcgtcttctcatcgtctttctcctttgccttcttctgttccttttcaaattccttgagtaattcgaaatcttccttactcaaacggtaacgatcataagcatcctgattgagaaacaccaacatcacatcttgctgcgatccccaggaagcatgcgcacgcataccatagcgttcggtttggaaaagaatagcattcccatcgagtacccaacgcggagcaccactgatatatccactatttgtcagattagtagttgcccctccctgtgcgctgacaatgcctacatccgaataaggatcgtggcggttgcctataaattcgagagtgaaccatttaccatcaggcgaccattcgtaatcgaatccacctccggtgttataccatgtagaaccatccgttacctgacgtaccttttt

SEQ ID NO: 8398 - DNA, 2922 bp, Unknown
  gut microbiota DNA sequence
caatgaaactaaaccacgacagacaaatgagaaagagtattgctataattataacatctatattagtactatcaggatgcaacaaacaacaatccgtatctgacagactactaaatgaagtaggaaaggttattgccataaatcctgacagtgcatccaacctactaaaaggtatatcatctcctgaaaaactagacgacaaaacctttgcacgctggtgtatgttatcaggaaagattacagacgagattttcaccaccatcctaccaacttatcaattagagagggcttatgactggtattcctcgcatggtagtcctgatgaacaagtgcaaattctgatttatttaggtcgctcttattttgcagatggagattatgataaagcaatgtcaatatatactaatgctttggatattgcagaaaagaataagcttaataacctcaccggatatacatatagctatataggcgatttatatggagagaaattcatgcggacagaagctatcaaaagatataaggctgctgccgaatgcttcaaaaaagaaaataatacagatagctatgcttgcgcattaagagatgtaggacgcgaatatgcatgcatagactcgttatcacgcgctttaaaaattctaactatagctgattctgtagcacgtaatactaaaaatatcgaagtcactgcatcaatagacaatgccttagggaatatttatgcaatgcaaaataaatatgataaagctgaagaatactttctcaaagcattggtaggaagagaaacaatgcccgattatatggcactgatagacttatatattgcatcggaggctattaacaaagcaaaagagctactatccaaaataccacaagataatccaaagtatacatacagcattaaatatttatactaccaaatctataatgaagaaaagaattataaagaagctcttactaatctgaaagaatacgtcgaaataactgattcaatcatatatgctgataaccaatctaagatattgaacatagagtctaaatataatcatttaaagatcagcaaagaagtagatagattaaaaattaaacagcaaagctacattatagttttagttatatgcattggaatcctattattaataataataggatatctactatatcgaaagaaagcaaaagagaaaatccaaagacaacaagaagagttgaaccgaataaagacagatttgctttatgtttctttagaactggaaaagaaaaaaagattgttagatacatttaaggagaaaaatgagagctatgaggaaatgcaggaagaaataagtctcctaaccaccaactataaacaattgcaaaataaaattctagagaattcacctttacataaagaactaatacacctagccaaccaaaataagcccagaaataacaagccattaataacagacaagcaatggaaactcattgcagatgaaataacatatatttatccgaatttacgtaaatacatatatagtcgatgcccagatttaccagagcaagacttttggtattgctgtttatatatatcagggtttgacactaacacagaagcaaagttactaaacattacagtcgactcagtaagaaaaaaaagactcagacttagacaaaaactgaatataatattaccagataataatgctacattgtatgattatttaattgaaaacatgcactaatatcctcttcttaggaagaaataatcagcaacataaaaggatgtccacgcaaaacatcataagcgactgattatcaagcactgtttgtccacgctgaaaaacttcttttatttgcattccccctcatatctccataaatttgcaaaaaacaatcaaagatatgagaaaactaagcattttactattattaattggcattccattcataataatagaagccaataatctatcaacacaaagaactaaaattataagatggcataaatgccaaaaaacaccaaattctatcccaatagaagctatccaagacgaaaactctattgaagttcgttttcttgaagacatcgacgatcaagttactttccaagtaaaagatcaactgggaaatattatcttccaagatgtgatattaactcctaatgagcaaaaaacttataagattgatttgaaaggctacagagtcggtcattatgaacttctctacatagaagaagacataactttcattggagagtttgaaatcgaataatcaacgataaataataaaaatatcaaactttataaaccctataaaactaataattatgggaaacatttttagattcttattggtgctgccttgcatcaccttgttattgtactcttgcgaaagtgagattgaaaatgagatccagtcatctacagaaaaactgaacttatcaggattggaatcggatagccttcaattagaaagttatgaattgtctgaaatgacagatgagctaaaagcattaaaagaaaggatagatgaactaaagaaagcgaagacacgatcagtagcttcaagtaactatagccaatatttttcagaaaatatgtgggctattagagagttacccttcacacttagcactggaggtggatatttatcatgtactggttggggacagagagtgacctatgagggatataatcctggctcttatggtaaattctatgtccaaattccctcatcaattaccggcataccctatttaatttattcaaactactcgaaaactcgtctagctgtaggacattacactagtaatccggaatcaaaaatattacttgcaatgagcagtaattccactacaggagccatggattcctgggacattatacctgctactaataatccaggaacttatgtccttcaaaatgagctatatcttggccaagg

SEQ ID NO: 8399 - DNA, 482 bp, Unknown
  gut microbiota DNA sequence
aaccaaaggaaacgagtgtcaacgagagtgcaagttaaataactgagaatcaaaacataatatttatgtgtatacaatgagagtacaaccgaaagactaaccgtttaagcaatagagagaggataattagcctttaccctctctccaattctatcagaaacaaatatttattattacctaattaattccatcccgggttctgatgtccttccaacgcaggattagcctgaatttcatctaacgggataggccataacaaagcatattcaggaatggcaccagctcttgtgcttccatctggcttgttttggatttgagccgatgcaagagcagtccatttcaattttcctgattctgtagatgcttccggatacaaacgagtacggcgaatgtcatcccaaatcttaaattccaacggtaactcatgcaaacgttcagtcaaaatcgattgtattaaatcgtttcctgtagccgtctcatct

SEQ ID NO: 8400 - DNA, 720 bp, Unknown
  gut microbiota DNA sequence
caaaacattggacgaactgaaagaagctgccgctaaaatcggtttcccttgtgtcgttaaaccgttgatgtcatcctccggtaaaggacagtcgctagtgaagagtgccgacgaacttgaacacgcctgggaatacggatgcagcggaagccgtggcgatatccgcgaacttatcattgaagaatttatcaaattcgacagcgaaatcaccctgctcaccgttactcaaaagaacggtcccaccctgttctgccctcctatcggacacgtgcagaaaggtggcgactatcgcgaaagtttccagcctgcacacatcgatcctgctcatttgaaagaagcggaagagatggcagaaaaagtaacccgcgcgctgacaggcgcaggactttggggagttgagttcttcctaagccatgaaaacggagtctatttctccgaactttctccacgtccgcacgataccggcatggtgactttggcaggaacacaaaatctgaatgaatttgaattgcacctgcgtgccgtgctcggtctgcctattccgggcatcaagcaagaacggataggcgcaagtgccgtcatcctctctccgattgccagtcaggaacgccctcaatatcgtggactggaagaagtgaccaaagaagaagatacctatctacgtatattcggcaaaccgtttacacgcgtcaaccgtcgtatgggtgtggtgctttgcta

SEQ ID NO: 8401 - DNA, 1452 bp, Unknown
  gut microbiota DNA sequence
tatcaggaaacttcgttggggaatccggagggtgaaaaatgtgttatctttatgtcgttaacaaataaggaacgcgttcgaaatgtgtgaaatcttaaaattattttattatggcaatgacagtaacttattcagtagtgccgcgcaagaatcctgccaaaaaggatgagtcggcaaagtattacgcgcaggcacaggcttcgggagagttggattttgaagagttgtgcgagggaatcaccagtcggtctacctgtacggagacagatgtgcgtgccgccatttcgggtattctttatgaggcgaagcgtgcgttgaaagcgggaagaatagtccggctgggtgatttgggcagtttgcagatcgggttgaacagtgaaggagctgtgtcggtcaaggagttttcaagttcgctgattacggctgcccatattattttccgtcccggaaagacgttggcggacatcacgaagattcttagctaccagcaagtaacgacgcgtgcagtggcccaaacgggcggtagcggcaatgaaggagaggacgatgacaaaggttccggtggcggttcagacggtggtggaagcggagaagctccggatccggcagcatgataactttaatattggatcaaatgaaagaaattgtaactaagattttggatgtaatcatgttccttgtgcctttcttcggaaaaagaaagcggaacagaattgtgagagaggtgcgcttcaatgctacccataaggaagtgtgtaatgtgaaaacgacggaaagggagaaggacgatgagaaagattagtctgattgtgattcactgctctgctacccgtgtcgatcgcgacttcacggcgaaggatgtggacactgcccatcgctttcggggcttttcgtgttgggggtatcattattatatccgcaagtcgggacagatagaaccgatgagggatgaagatacggtgggtgctcatgcacgcggttttaatgcgattagtttaggggtgtgctatgaaggcgggctggatgagaacggaaaggcagcggatacacgtacttcccgccagaaagaggcgatgcatcgtctggtaagcgagttgttgcagcgttatccggatgcaaaggtggtcggtcaccgggacttgagccctgacactaattataatggaattgtagacccctgggaacggatcaaagagtgtccctgttttgaggtgaaagcagagacatggtgatttttatcctatttattactgtggtggttaattgaccaccacagtagtgaaatactctttaaatacctccgcggctttttcaagttgttcgggggtattttcttttacgtctttcagcttgtattcctgctccatcgcttcatacttatgtacgcctaatgtatgataaggcaggatttccactcgttgcaccatcttatattttcccagagcctctcct

SEQ ID NO: 8402 - DNA, 636 bp, Unknown
  gut microbiota DNA sequence
acataagccggaatattagtatcagcagacaaacgatctttgttctcccaatagtacatcattgattccacaacaaaatcttcggcaacagcttcatcatgcacataggtacaggcaaagtggacaaaacgttgctggtagtctataaaaaatttattaaatgcattcaaatcaatgctcattgcctatcaaaccgtattaaataaaaggagaataatggtacaaagttactacaaaaaagtgaaatgcggaaagatatagtgatagaattgagttacaagggttttagttgaagtggcgataattcgtgaagccattacaatccctgccgaagccaaatcctgacgccgcaacgttacttgttcgtaaccatgcccgaaaatgcgacaaacgggcacggagggcgaaacaagacactaaggaatagtgagttaccgacaactcacgcgaaaaatccggttacggaaaaagattgcgccgttcctctccgttttgcgtaccgacaccggactcttcaccaactaattttgaaaccaaaaaattaaggacaatgaagagtacattttcagtaatctactacctcaagcgtcaggtagtgaaaaaggacgggacagttcccgtcatgggacgcatcac

SEQ ID NO: 8403 - DNA, 1171 bp, Unknown
  gut microbiota DNA sequence
atcttaatacgcattcttctcccccacaatcacattcgccaccgtcttataaatgatatatatatcaagcagcattgtccaatgctccatataccaaatatcagccttcacacgttcctccatctgtgataattccctcgtttcaccacgaaagccatgcgtttgagcccaaccggtcactccaggttttataaagtgccgcaccatatacttatcaatcaaacgggcataagtctccgtatgggctaacatgtgtggacggggaccaactatcgacatatcacccttaaagacattgataaactgaggaagttcatcaatattagaacgacggagaaaatctccgaatcttgttttacggggatcatcaaccgtagcctgtttactgtcggcttcattattcactttcatcgaacgaaatttataacacacaaaatccacaccattcaaacccgtacgcatttgcttaaagaatacaggaccgggagaagtcaactttatgatacttccaactatgagataaataaaggggaaaacagtaaccagaaaaagaccggagaaaacaacatcaaacatccgtttcaacatacggttctccatcttacccaaaggttcataacgcagattcaagataggcatattgccaaccatactgtgccaaatacgacgaggaaaacctttacagacattaggaacaccatgaaaataaagaagatggttttcacagtgattcataatagaaaaattataacgtccctcctccatcgataaagaacaaaaaacatgcttgattcctgggtgggcgaacataaaatctgaaaaatcgtcgggattacctagataggaacattgggaggaaaaggcttcattcggttttatatcaaaatagcctacgacctcatacagcgaagacgccagagaactctccatctcctcatacaacacctgcatattgttacctcctcctataaaaacagcataacgcctatgcttgcccttagcacaatagactatcaggaaatggcgaataataatgcgataaatacttaagatgacaaagagaaaagagaaatatgcgacaaagaaaagaggagaatagatagagattccactaaaagtcatgatacatgcccaaaagatggaaaaagctataatattcttcaacacgcgc

SEQ ID NO: 8404 - DNA, 587 bp, Unknown
  gut microbiota DNA sequence
tgtttttagcgattaatggtttgcagcttgccgccgttaggtggcacaggtgcttgttataagctaattttcgtattcaatcttgtaatcttcatatacattgaatacagtttcacaatcagataaattgctttcaagcaaaggtttgacctcactattccaatccaacttacccaaacctgcacctattttcgggagcgacacagttttaatacctctgctttcgcatacttttttcaagcgtttcaagcctttattcagatatgtaagttctgcatgatacatatccggttgtgtagcgatgtagattatacccggagagaaacctttgatttctcctataaacatatcaccagcttgaaacttggtgtttcgtgtgtacttcttaaagagtttttggatttcagggaattgacttgatagcttaaaggcaagcccagttcctaatccttcttgtgagccaacagccacaccttgcgctatgtactcatctttgctttgcaatatatctcccgaaatgtattttatcatattgtttccgtttttctgttgcttataatgtctatcggctaactaacttttcggaa

SEQ ID NO: 8405 - DNA, 1180 bp, Unknown
  gut microbiota DNA sequence
aaagaaaaagaactattcagcaaacataggatcccaagcaggaagtcggataggcttctgtttcaacacctcgagagcttttttcgatgcatatttcgtttctactactagacggaacatatattcgttaaaccaatcatctgtcataatgagataaccctgataaccggcagcaggcccccaactattttcaaccatccatttcgtcggttttccatttttgtcaagatcgacggccataagagtcatggcgtgactggagccactggcaaaactttggatacgttgcttcttgttcatgccaaaagaagtacccataagagattcgtagtcgtagtttttgacatccagtagaccacggtcagagtttagaaacttacctacatcgcaagaaaaatacatcattgtgctatccttgagagaagaaatagccatttctttgatatcctcgatggggagattgacatacgtccagtttttgccgtcgtaacggtggcggtcgtagtctatctcataacacttataatattcacggctcggatcgttcattaacatgacataattatcaatcagtttttcgtcaccatactttttcaggaaagaaagtggagtgtaagtttcggtagacacaggctcacccttagcgttatattcagtccaggtaaattcagtaggaggaacaccgagattcaacactaacatgcggtagatggtgctcaacatctctgtttttgttttctcaagggcagcaggcttgacaccttgcgcagcaagatcacggagttgaagcccctgttcacgaagtttcagggcgatcagacctgccatacgggaggtattttcactactgttggtttccggcatcacatctttgggaacaagcccgtatttactgacaatatcggctacaccggtgaatgttccaccgtcactcaaaggattacggaagagccattccaccattttatcatccatcggcttactgctggtatcgataataccttgcagaaagaggttggctttctccagttggtcgaagaagaaaggataagtttgcgagaattcgaaggaaccgaggttatgcttggcgatcgctttggcacgcatcacattcaaacctgtaaaaagccagcaacgaccagaagatttttggtcggtgatacctttagaagacactttg

SEQ ID NO: 8406 - DNA, 611 bp, Unknown
  gut microbiota DNA sequence
attcagtgttcaggcttttcacaacggagctttcaagactgtaaccaacaatgacctgaaaggtaaatgggcgattcttttcttctatcctgctgattttacttttgtatgtcctactgaattggtggatatggctgaaaagtacgatcagttcaaggcgatgggtgtagaaatctattcggtaagtactgactctcatttcgtgcacaaagcttggcatgatgcttctgaaagtattcgcaagattcaatacccgatgttggcagacccgactggcgctttgagccgtgcactgggtgtatatatcgaagaagaaggtatggcttatcgcggtacattcgttgtcaatccggaaggaaagattaaagtggtggaactgaatgataacaatattggccgtgatgcaagtgaattgcttcgtaaagtggaagctgcacagtttgtagccagccatgacggagaagtttgcccggctaaatggaagaagggtgagtctaccttgaaaccaagcatcgacctggtaggtaagatttgatagatcttgataatggtgattatgggaggccggtaacgggagacgctgccggcctttcttttaaaaaaatgaaagg

SEQ ID NO: 8407 - DNA, 896 bp, Unknown
  gut microbiota DNA sequence
catatactgttcacgattaatcatattcaaaagtttttagggttataagcacaaagatatactattttcggaaagtttttagggttataaccctaaataaatccataaattcagattcttttagggttataagccgaaaaataaataaaagaaatatgactaaatccgatttattaccaaataaagaaagtacctttaccccaataattaataaaaaatggaaataaccgatttaaaacaaatgacaaaggaagaagtttttaatttcatcagacaacgcctttctttcagtaaagaactgcaagaacaattcaggcatgtgaataaagacgatctcgcaaaagaacatcgcagattcgaaatgtccggaaatgaatcaaagacaggccaatgcacgattttcaacacagcgattctgaacgagtttgccgatcttggcatctatgattatacttcttatctttttctcgacttccacaatggcactccaaccgtttatctcaaatatttctccgaaaatgaaaatttggaatatacatttaccggatataccacaacggaaatcatctttgcaattcttgaactgactatcttctccggaaagcccaaaagaaatcgcagctaaaaaaagaattgcacggaaagacaatgcgaggtcaaaagacttttatggctttcatttaggcacggattacacggatttcacggttccattagactaaaaccgtgaaactcgtgtaatccgtgcctaaataatatcaatctaatagatggttttacttttggctccctcctttttattatcacattatatttgccacccgtatagcatatttaccatctttataccatactctctattctcataccatatttcctgcatttatttcctcttt

SEQ ID NO: 8408 - DNA, 1067 bp, Unknown
  gut microbiota DNA sequence
tatacgaaattatccgaggatgaggctgtgatgcgtgaattgtcatctttgctggtaatccgccggaataagaatacgggagataaaaatgaaggatttgaaaattgatgaatctacgggattagtgttggaaggtgggggaatgcgcggagtattcacctgcggtgtgcttgattattttatggatcacaatatccggtttccctatgcgataggagtgtctgccggtgcgtgcaacgggttgtcgtatgcatcacggcaacggggacgtgccaagtacagcaacattgacttgttggagaagtataattatatcggtctgaaacatttgttcaaaaagcgtaatatattggactttgatctattattcaatgagttccccgaacatattcttccttacgattatgaaacatactttgcttcaccggaacgttttgtgatggtgactacgaattgcatcacgggagaagccaactatttcgaagagaaaaaagacagtcgcagggtgattgatattgtccgcgcatccagcagtctcccttttgtatgtcctattacttatgttgacggggttcccatgctcgacggaggaattgtagattccattcctttgcaaagagccattacggatggctgcacgagaaatgttgtggtactcacccgtaaccgggggtatcggaaagattcgaaagacattcgtatcccttcgtttgtatatcggaaatatccgaagttgcgcgaagcgttaagtcggcggtgtgctgtttataatgagcagttggaaatggtagagcgcatggaggatgaaggacagattatcgttattcgcccgttaaaacctgtagccgtagaccgcatcgagaaagatgtgcaaaagttgacagagttttatcaggaagggtacgaatgtgcgagagccttacttgaagaataaacaagttctccatagttgaacaatagacaggatctcacatgcttttttgtttttcttgaatgtcagataggataattggacgtgttcccttttcattttgaatgggtatattgttcagcagccttttttagtt

SEQ ID NO: 8409 - DNA, 1121 bp, Unknown
  gut microbiota DNA sequence
cagagtacctttactcattcaaccggatgaataataatgcgaatcagtagttgaaatcactagctgattcagttagttaaattgttattattcaattaattatctcatttatttatttcttaatctccttgaaaatcagtatattagaagaataaaaccactcattattctaattatgattcccaaggagaaagagctaaaacttataaaaatatatatgtatatctgcgatgtttatcagtcttcactgaagttctactgtcagaggttcagtaataacgctacaccgatcttcactgatcaggagctgcttaccgtatatctgttctgcggagcgtatcagcgctattttagcatcaaagagatacatacattcaccaaagaatatttgctttcctggttccctaaccttccctcttatcaaacattcaactatcggctgaacctgatgagtgaggcgattaatgaactggtgaagcatctcattactttctttaaaccaacagattgcgattctatgatatcacttattgactccatgcccatcattacttgtgcaggaaagaacaaaaccggaaaagtggctactgaaattgccactaaaggatactgctctacaaagaacatgtattatttcgggctcaaacttcacaccttagctttccgcagggaaggaaccattccattccccgaaatgatcatcttatcatcggcagaggagaatgatctgactgttcttaaaagagaagccgctgatagtcttataaacagatatatatttgcggataagatatactcagacttctcgttctggggaaacaaacagcaggaacaaggggtaaccatgatgactcccgttaaagcaataaagggagaggagcctattattactcaaagagagaaagcgggcagagacctgttttcaactgcattatcaaaggtcagacaaccgatagaatcttttttcaactggctgaatgaaaaaacaaatattcaaagagcgatgaaagtcagatctacatctggacttttagtacatacgatgggcaaaattgccatcgcattcatttatctaattttctaaaacaaggaatcagagttcaactactgattcgcattaa

SEQ ID NO: 8410 - DNA, 725 bp, Unknown
  gut microbiota DNA sequence
ttgcctaagttattgcaatatgcgtatcttcatcaattaaagccattggctatggctgaattctggtggggcgactctcctaaaaacgaaatccggcatcacggatattattatccttcctgcaaaggaaagtgcgaaccgattctgcaacacatgttgcaaggattggaggtagacgagaatcctctgctgaaccctgttcatgaagaggaagaactggaaatcgtgtttgaggatgaatggttactggtagtcaataaaccggcagggatgttgtccgttccgggaaaagcagaggacagagattcagtctatcatcgtttgaagaagaagtatcccgaagctaccggccccatgattgtacaccggctcgatatggctacttcaggattattgctcgttgccaaaacaaaagaggtacatcgggatttacaggcacaatttgcaaacagaagtattaagaaacgctatgtggcggtgttggatggggtgatagtgcagacagagaaggagaaggaaacaaaaccaatagcagaggaaacaacattaatagcagaggaaactgtatcaacgaaaaaaacagcaaaagtagaaagaactgatttagcactagaaaatacagaactaagaccagaaaggacagaaaaagtagaaaaagacaaaaagacaaaaagaacagaaagaacaggaaatacaggaagaatcgaactccctctttgtctgaa

SEQ ID NO: 8411 - DNA, 1389 bp, Unknown
  gut microbiota DNA sequence
tttgccgaaaatgcaggagtagtactgctggaagtacgcaaaggttacagtaaagccaaattagaaataaaacccgaacatcttaacgcaggtgcccgcacacaaggaggagcgatcttcacattagcagatctggcgcttgccgcagctgccaactcgcacggtacactagctttctctctctcgtccactattactttcctacgtgccagcggccccggagatactctctttgccgaagcacgcgaacgctatatcggccgaagcacgggttgctatcaggtagatgtaacgaatcagaacggagatttgattgccacttttgaatccagcgtattccggaaagatcagaaagtgcctttcgaagttcaggaataaaaaaaacaggaagatgtattaacactcttaaaagtctaccttttagacacagataacgcggataacacggataagaagataataaatccgtgtcatccgcgttatccgcgtctaaaaaataacaggttggcaggtcaatttactgctgatatgccttcgttttttctctatatctatttaacgatagaagtcagcggatgccggttacccgtcacattattcaggaatgcttttgccgaaccgaagttcaggaataaatccaggcggacaggaagatggttcaagtcgtccgtcacgaagaaagtaatcacctccttttcttttcctttcttatcatattctaccaatgagaagatcagacaacggtaagtaactccattctccgctttcacattttcttttccacggtagataagcgtttgctcttccactttacggcccgtagccatcgggaacttaattttgtctcccaccttataatctgcagggtcgtaagaacgtgcctgtgccagaatactcaacatatcgtatatacaacggctatcgctagcttcagattcatcaaacgctccatcccggtaagtacgcttctgatttaccaggcaaagaccgtccttataagaaaaccaagcctcatcgaccgtgtaacgttttccctcttcggcacctttgcggaaatagcgcggttccagtttttcaccgatcacacaagtcagcgtatcgcgcatcttgaaaaagaagtctgcccgtttgctacctaaagcaagcaggttgatccgataggctggttgcgaatgataagtagtcgcattcgttgtcagactggcgagtccggctttcacccaaacaaacttccagttgaagtataaatcatacattacatgttcgccggattgaaacgcatcattcttcgcttcacattgggcactggcagggagggcgaagattcccgtcaataatgccaccaatccaataataaggttacgtcgaacgtcaacgacggcggttctg

SEQ ID NO: 8412 - DNA, 1198 bp, Unknown
  gut microbiota DNA sequence
acagcttagtaatagggataaaagacaaggctaatatcaaccttgtcttttttgtagctccctcatcaattcatctacaatatatgcatcgctcatgagatatagatctccaagtcggtggacaatgcgctggtagctttcgctattataaaatatatcaagtgcctgtagactggaaatatgcagacgggtagcaagaagttctacaatgctgtaatatttgccttgcattacaatatctgcattggggatttcttttgagagagatgggataggtaaaagtatagcatccacaaaatgtaagtgttcgtcaactactttttggttcgtaatacaaatttgattattaggctcttgatgaatcaaacgtgacaatgcttcttcacgagtgtaatcaccacgcatataaaggtcaatagtacgtatcacacggtcatctgctataccgccttctattatgtcataatcctgccatataacattcccttgtcgacatgctacaacaaaatccagccaatgtgcatcgtaagtggtaaagtgcaaataatgaaaagaagagttacggcaggcatctatatccaatgaataaatattgagccatacactattttcatggcgaatatcagctgtgcgaagagcccaacgaatagcctgttcctttaaatcagtaagataaaagcccactccgaaatcaagatttggtcggcatactccagctaatggttgttctacacggtaagtagaaccatgataaacagttaacatgacttatctcctttttgctgtgtcgaaacttgaaaaggacgataatctttcggtaaccattgtggatcacgatgatagatatattctaataaagaatctactatgtaggctttgccttgggtatgcaaagtatcataaaaagtatttatatagccgtctatagcacctaattcttttagtttattatatacatccgcactataacgtcctaaccgttcggctgtattctctatacaatagataataaactctaattgtttttctttaagggtcatattattttctcctttcttatcttaatccattagcgaaaaagattaatattagcaaagatagaaaagttccttctttcttccaattaattggtatagtatatcacgtttccttatggaatattaaagtcgcattccacatttttatttttctgtctaac

SEQ ID NO: 8413 - DNA, 829 bp, Unknown
  gut microbiota DNA sequence
cattcggggtgttctttatccttaaaatgtgtccaagtgtagtcatgtaccttttcaaaccattttaggcatttttgatctcccgttagttgataaccttttagtagagatatcaaggtctcaatgtgcacccaccagagtttctgatcccactccaattgttgaggtgggcaaccattacgatccataaagtaataaatgccaccgtactctttgtcccaaccataattgagcattgtaagggtggtctctttggctttctctatcaattcaggacgattcaggcgtttacctagatccatgataaaccacatcgcttcgatggcatggccgggggtcagctgacggccttcaaaacagtcaaccagactaccgtcgacatctacattttcaagaatgatacctccgagttcaggacggtaaaaaatttccattacttcgtagatgcaagtttccatcgtttcttttagataattttcatctaaaagatgttctatctcctgagccagattacagagtatcatcggcagggcaaagttcttcagattacgggtccccggatgaagtttgttccatttgcctttcggattatccactttagacaggataatatcgaaggtttttttggcaatgtctgcatattcctgattgcctgtggccagacttagctggccgaaagccatggtggcgaatgtatacgaaaatatattgtacggttctaccaatggtctacccgaacgatcgagagaaaaataccagttatagtttccgtcatgtccatatttttttaaaaaatctccaccttgaatagcacaatccaaccattcct

SEQ ID NO: 8414 - DNA, 2212 bp, Unknown
  gut microbiota DNA sequence
aaagatgaaatcatcagagtaccatctgtacctttgaaacgccctgcgggaacttttggctcgctcatttacaacaagccggaagtagaaaacttatattagtaagactaaatctcttgtgaaataaattttctcttaagttaaaggggatgcttctcgataaggtgttagtgagagcatccccattttgcttcataaatgtattgagaatgaatatacttaaacaaatatatgagatatatgaatatctgttttatcgaacatatatatggcagcttagattgtggggagaaaagcggtcgccagaagtagcagggttattactaccgacctcattgtttacttttgtttttgttggcccaatagttggagtattacattcattggaagtacaaaacaatgaagagttaggtatacttttggctgttatattcacttttgctgctcatagattatttgttagcgatggacgatatttgtctattgctgataaatatcgtaatgaaactaaagaaaaacaacgacaacgtatgaaacaagtttggatttttttagcaataaatcttatttgggtaatattctgtatcttcttattcatcaaagtgatacccccgccatcaaatgcagatacttctaataagaatccttctccagaatatatagagatgctgaaagatataagggaccaacgaccacaatagaatatgaacagtgaaataaatttgttgtataatagattataatttagaacttagaaaaatgagaattattttatttttattattgagttggtacacaatcgggaatatacaagcacaaatcaaagagcctgtaaagttcaaaaatgagttgaaaatgacatctgaaacggaagcggaaatcgtgtttactgcttcgatagagaaaggatggcatgtgtattcgaccgggctaggggatgatgggcctatttccgctactttcaacatcaatgcgagtaatcatgtagaaacaatgggtaaattgcaacctgttggaaaagaaatcagcatctatgataagatgttcgagatgaatgtgcgctattttgaagatacggtacagtttatccaaaaagtgaaatttacaggaaatgattactttatggatgggtttctggagtttggagcttgtaacgatgagagctgtttacctccgactcaaattccttttaaatatgggaaaaaagcagaagcagatttaatagttgcaaaagggaaagaagaggctccggtaaatgtggtagagaagcaatcggaaagtgatctttggaaaccggtaatcaatgaattgcaagtgttaggtgaagaacattctcaagaggataaatcttggttgtatgtctttgtcactggatttcttggcggattattggctttgttcactccctgcgtatggccgattattcctatgactgtgagttttttcctgaaaagaaacaaggataagaagaaagggattcgggatgcatggacttatggtgcttcaattgtcgtgatttatgtaacactgggattagcaattactttaatatttggtgccagtgcattgaacgctttatcaacaaatgccgtattcaacatccttttcttcctgatgttggttgtttttgcagcttctttctttggggcatttgaacttactttaccttctaaatggagcaatgcagtggacagcaaagcggaagcgacgagtggcctattaagtatttttttgatggcgtttacgttatctctggtgtctttctcttgcacagggccgattatcggctttctgctcgtacaggtttctacgacaggtagcgtgattgctcctgctatcggaatgttaggctttgccatcgctttggctttaccattcacactgtttgctctttttccttcgtggctgaaatcaatgcctaagtcaggagggtggatgaatgtaattaaagtgacattgggctttctggaactggcttttgctttgaaatttttgtcggttgcggacttagcctatggttggagaatcttggatagggaaaccttccttgcgttatggattgtgattttcggactaatggggttatatctgttggaaaagatcaagtttccgcatgacggtgatgaaaacagggtaggcgtggggcgcttctttcttgcgcttgtttctttagcatttgctgtatatatgattcccggactttggggggcac

SEQ ID NO: 8415 - DNA, 3489 bp, Unknown
  gut microbiota DNA sequence
aattagggggggctagcgagacaaatatttgtttataatcttgtgattcattggatgatgcttaagatacacaatgagtctatatgtgtttaatgtatctttatatagcttattatttcatctaattgggatgcaatatttttgaaatctgtatataagtcgagagttttgacatagattctatttccacatatactggtttctaaatcaggagtaatttcttcattagtttttgcatataaaagcatacctgcaacattgcttgaattttgtatatcatagttttttacataggtgaaaatttggtataagttgttagaatgaagggtttgtttgttatattgtttttgcattgtttgcgaataatatttggtgtcaataataagcgttcttccattgtattctaacatgatatctgattgcatacacggaagtaattctagtgctttgttatcggattgataatcaatattccattttattcgggaagtactggtctttaattcaggatgttctgttttgtaatattctaatacaaatttctcataaagccgatgcatatattcatcagagaaagttgccatgtgatatttaccatcttcagttgtctgtagtaaaccttctaaaataaaataacaaatattcatcagcattttataggtctgattattacgttgaaaatagagtgtattccactttacgatggatggttcaatggtattaatgttgacgaagaatggtaggactttctttaatttgttttttcgttctttggctactgtctttccttggagaagaatactgattgtagtttttaatatttggttaaatatattattttctgatagttcatcaaattcacatgataggagctgctgacattgtattctatgtttaatagtttttgttatatcaattttccctctcattgtaggtagtgattccgtttttggtacatattcacgatataatccttgttttaattgatacgaaatacctcgcgataggatttctgcaaacaagtcttctatatgctcgaatttttcagaagctatatttgcatagttgttacgcttaagtacctgaaaggcataagctagcatgtaataaatatttttgattaatatatttttgtcatttgtcattagaataagctctttagttcattttcccaaaaatcaactttttgtttatcatcaaaccaatattcatgtaacataggaataatgtcatagaatataatttcttttactttatcacaagattctaatccacataaataactgtgtcctatttggaatccgtcaccgagtgattcatctttggatatttcatcatttaatctcttgatcgtttcaattaatttgtcgaaagtggtattatgtaattcattttggtacttttggaagccgattgaatcaaatccaggtttcatgttgtagaaacagaatcttcttctcaatgcataatcaatcatagccaagctgcgatctgcggtgttcattatacctatgatgtggagattgtttggcacagagaaaagttctccattgtgtgctaatgctattttaacattacggtaatctttttcaattagcattaataattctccgaatattttactcatattaccacggttgatttcatcaattatgaaaaaataatcgtgttctggatcatttccggcagtgatacaaaatttgtaaaatattcccttttttagttcgaatttttcttcttgaggtttataacccataacaaaatcttcgtatgaataattttgatggaattggactattgagattcttgaatcatctttttctcccattattgtataggccagtcgtttggcagagtatgttttacctactcccggggctccctgcaatatgatattttttttgtatttgagtatactttttagggttttgagttcttgttcatcaagaaatacgtcatttagaaaatcttcatctgtgtatcggccgatattctcatttgttcgtttaataggatttgtatctcgaattatatccataatgaaatcatattcattttgggtaagtttgaataaactgccattaggattagcaaagaactccatattattgagttcctcgcagttttttaaaatcgaataatcaataggataagtaagcgattctgttttttggaaatagatatgttttccatcattctttttgtaaatcttagcaagtgcaactacttgtttggtaggagttgcttcataacagattgctatatcaccagcttctgcatctaagaaattctggaatacacgacgtttatttccgttgtcattgtataaagtgtaagactgaatttctcctatgctccaattggacaaactccacatttgaggattagcttttagccaccagtagtgaagtttggaagttgggggagttaaaggagggatgtttttttcttgcttttttcctgctatctgaaactttttttgacttttctgattattcttatctaagaagtatagaaaatctacagtagtagttgtcagttcgaaatctggatcacaattcggagtgcgagtgaggacatcagaaagcattgctttcagttctgtatcttgttgcaaaatccatttgatttcattatataattcgtatgcttgcaatacagtattgggagtagcaccttttttgaaggtgtaactagtatttaaaatttgagatactcgcgagaattcccttggtttaaatatgtaatatcgttctggatatctaagccataaataggtgcttattgttctataatcttgaaagtgatttctccaagtgctttgattgtatttctcaagtataaagtctgattctttaataaatttataaattcgatcggaaaggggaatatgttcattatataaatcaataaacatctttcttacatcttcgggggcaaccattgcgaaattctttatcatgcgtctaggaaaataatgttgtgctcctagaagattttgagttttcgaaagagaagttttaagcatttgtgtgaaatctggggacttgatatcccaatgggattgaaaccagcttactgcttcccatttatacttttcatcattccaagaggagaagaaatttgccttataatcttttatttccttctctaacttatttatgtctatattcataatagggtatttttattgttgttctttggggtataatattcaactctttcatctgccgccattggaggatatgtttcgttatgaaaatcatattttctagtttcgttgagtaatgagttgtaattatcagaatcattatcagtccattgttcacattgatgaataactgtttccagtgcattttcagcttcttctggtgggtatttgtattttttcagaagtctttttatcatacgacgcatccctgctctggcggattttttcttctgccagtcgattgaaaatttagcttttaatatagataagtctttagg

SEQ ID NO: 8416 - DNA, 835 bp, Unknown
  gut microbiota DNA sequence
ggggtctttgcttaactcctgtgcaaggtcgctcatcgcatcgggcaatgtttttgtaaagttagtcagtgccttgccctgccgctcataaaggtcggtgctaatgaaattgagcagcatactacgactccagccgttctccaccgtctggtgaacatagaacagagctttgtctatatcgtctttcactttatccattatcaagcaatggtgtctccatgggacttcaaatattccaccaacttggtggaataattccgtttcattttttccaccaagttggtggaaagttttcagagcatccttatataacaaataaaacttcctacaatagtagatattgctctttgacaaaccagctgcattgggtatagcttcacgtaaatctttgctcaattgagtgataacactttcgccccagcgttcttctacgtgcaattcaacaatgtcacgacctaaaagccagttgaatttcaactgttccacatttactttcaccgctgcctttatttggctttgacgatagcgaccgcaaaggtctttcacccattgcagatattctttatcaagtatgtttattgacttgttcattgtaatctataatacttcagttgcgttaatttttagttctcctgacatctgctttgggagaagtgtgtcgcgtagaattgttaacctaatactttcctgttcatttcttagtatttggtcgaaatacgatttatttatctgcctatttttgtaaaacagatgattcttattgttatatgtattgtatcttatccgcattttaattaatgtattaaaagtagaaaataatttccatagtgctgtc

SEQ ID NO: 8417 - DNA, 5608 bp, Unknown
  gut microbiota DNA sequence
attgatgtgattgttatagttggagtaaaatttattcttttggttgttagaatatgcagaaactcctattctaacaaaaaaatgatttgcaatgaacattctaatgcaagtttaatacttcgcttaacttatctccaataattttcttctcattactaccgatagtagacaatctcaccaacggaattccgtacaactctaagatatgatcctttttaatatcgcgttctgattgactcgtccccgatttatggaatgtataaccatctgtttcaatagccaataccggttgtttactcacacgattataaattagaaaatcaatatgagtatttatatttgcagcatatttgctttcctcttcattcaatagagaataatcctgaatcaacatatagagtggtaaatggcaaatgatattcaaatgacgcatattgatattctctttcaggatatcctcgagtaaggcgaatgtaagattctcggaatcgtattcggatattttcttgtgtttcttcaaataggcaattcgggcatctgtgtattgctcatatagataatcgaatatagaatgaattttactggtggaaacagtgccattgttatattcgatataagcaatcaaatcgctgatattgcagtctttgggttgttcgtttcccgatacgactaaatagaattgtgacttagccctcgaaacagcaacattgagcaggttaggatcatcggaaaaggaagtgatgacatcgtcgacagtagtcataatgatagcatccttttctcttccctgaaacttatggactgttgcgacatcaatatcctcttcaagtgcggattttactgcatctacttgtttgttatatggagcaatgacgccaatttcatctgtttcataagatagattcggtagtacttcctctttgataacatttatttcccgttgattcatgtgactgcgggagtggttacctttggctgtccgtatggcacaaatgacattctcttctcctttatcacgtgtcatgatgacaagatctccaccataaaatttctgattacagaagttgatgattcgaggatggcatcgataatgttcccgtaacaaggtctgcggtacatttggaataactttgcagatggattgcaaaaaactcatattggcacaatcatattccggcttaatcaggcaggcattagcgataaagtttagcttttccttatcttcttctgtgactacattggggagttgcatggtatcaccgacaatgattgcatttttagcacatgacaaggctaaagctccggtctcaacggaaacctgcgacgcttcgtccataatgatataatcatatacggcatctcgttgtagactgcttaatgatgaaaaggtcgtacttaatataatagggtattctttttgtacctctcgccaattatttcttagatcagggagcgtaaagatgggcttgtcatgattattgccataggtatgaaataactgattctttagatatttcattgatgtatcagccatttgtctagccatttctgctgcatctttgttggcaagttccttttctaatgtgtctatttcaacttccagttctgcgtactttgtttggtagaataagatttggaagtcggcgataatcaaactcatctcccgtttatagaaacttttatcggggattttacaaatcgctttgctcctgaatttaaagaataaccatttcaaccgttgaataaaagctgctattccccgaagacttgatgattgttctttttctgcaaattgctgacattcattccataaattcagaaggtctgccgaactggaactctttcgttgtttgagagtaatttcttttgttccgaactcttgcagataatgttgccactctatttttaaagcttgtatttcctgtcttgccatggcaaggcgttcctgtttggaaaatatgctttttagttcttctgtctgatgatgtatctgattgagaaattgaggttggttggcatccgcatcatgccatgactcaaagttctccggatattgtttttcctcttcttgagtctcgatgaatttctctttgttagctgtgctgccaagcaatgcaacaatgaaacccatatcgtatttggataacttctcaagtacattgacgatggcggagttattattagatactacctgaacagtcttaccacgcacaaggatattggctatgatgttcagaatcgtttgggtctttccggttcccggaggtccttgcacaacactgatttgattctcaaaagctgcctggactgctttttgctggcttgcattacaaccgaaaggaaaaatcaaggttgaggcagtctgggtctgcattttatatttttgaggattcagatatacagcaatagctctgttgtttgcgatgaaatgaatcttttcatattgttttgccaatagcttcgttccgtcatcagctttcaattcgttcgcatcggcaactttcttcaaatattcgaatatgcttttcgaacgactctctcccaagcacgattcgataatttctaagtccttttctctgtaatcatactctttaccattcagaaaacgaatgtgccaatagctgtgtgatccggccttgaaaatagataaggctttgatgtttgataaagttctccctttactgattatttgataattattggggtccggtttgtccggatcagtcagccaaaggacattttcttctttgtaagtatacgcactaggaacatttcggaatactatcttatagctgccatcataattctggcagctttctatttcgggagtcttgatttgaccttttataataatcagattttcggaagtatctatcataggcttgtgtgtaaatataataggtcgtgctgctgtttttatttattattttggatataaaagtaagaatattttccagaatatcaaaactgaagtagaaaaaacagtgaatggctttatttagctttgcattgttataaatatagagtgagattcggtttgggagtattgaacgtgataaaagagatttgttttgccaatgaaatcattatctttgcaaggtatatattaatgaacgaggaggatattatgcttgcatacacatatattgaacacggaaagtttgagttacaggagaaagcgagaccggaaataaaggattcacgggatgcaatcgtgcgtgtaacacttggtagcatctgcaccagtgatcttcatattaaacatggcagtgtgccacgtgctgtgcccggaataactgtcgggcatgagatggtaggtgtagtagaacaagtgggggctgatgtcactttcgtgaaacctggtgacagagtgactgtgaatgtcgaaactttctgtggtgagtgttttttctgtaagcatggatatgtgaataactgtactgatcctaatggcggttgggctttaggttgccgaattgatggcggtcaggcggaatatgtcagagttccttatgcggatcaaggtttgaatcgtattccggatacagtgagtgatgagcaagccttgtttgtcggtgatgtacttgcaacaggtttttgggcagcacgtatctcggaaattaccgaggaagatactgttctgattatcggtgccggacctaccggagtttgtactttgttatgtgcgatgttgaagcaccctaaacgtattattgtctgtgaaaagtctcctgagagaattcgctttgttcgcgagcattatcctgatgtgttagtaacggagcctgaaaactgcaaggattttgtgattcaaaacagtgaccatggtggtgcagatgttgttttggaagtagcggggagtgatgattcttttcatttggcatgggattgtgctcgtcctaatgctgttgtcaccatagtagccctttatgaacagccgcagcttcttcctttacctgatatgtatggcaagaatctgatttttaaaacagggggagtggatggttgtgactgtgccgagattctcaaactgattgaggaagggaaaattgatactactcctcttgttacacatcgatttccattgaatgagattgaggaggcttaccgtgtctttgaaaacaagttggacggggttattaaagtagctatatcagtaaataaatgaaaattaaatagaaatcgcatatgaaaaatatactgatagtgagcaatagtgatacgtgtcgcagtcgtatggcgcaggaaattttaaactcgttcggtagaggtatgaagattagtactgccggtgttttggttggaaattctgtcccggatgttgtttgccaggtgatggaacagaatggatatgacttttcccgtagaaagccatgtgatgttgcgacgtatgcccagcagacatgggattatgttattactctttgtccggaagcggaggaagtgcaaaaggaaatgcagggggtagtgagaaaatatgtttcttttaattttgcagatccttttcggggaggtattcatgctgaggatgaacaggaagaacgggtggtggcactatatgacgctatgcataaagaactgtatgagttttttcggagtgaattaatggagaaactcttgcctcgctgttcttgtggggcgaatacatattgtaggtgcgagtaggaatatatatgtgtgttgtccggtgatgatggcaaagttgattaatctttagcacgaagttgccagaaagcaatagcggatgcggcagctacattgagtgaatctaccccgtttgccatagggatgcggaccacatagtccgcctcggtaattgtttcgtttcgaagaccgtcaccctcggttcccatcacaatggctaacttgggttcggtcgctaagatgggactatcaatagagattgatttctctgtaagtgccatagcgactgtgcggaatcccagtttatgcaattcattgggagaaccatccaaccaagcccatggtatcaggaaaacagatcccattgaaactctgactgcacgtcggttcaacgggtcgcaagaattgcgtgtcagtaatatggcatctatcccaagagcggctgcagaacggaaaatagctccaatgttggtagtgtctaccacaccttcaatgactgcgatacgccgtgcgcctctacatatttcttctacacttttcgatgtcgggcggtgcatggcacagaggacgccacgtgtgagtgtatatccggtcaatgtggcaagcagttctcttgtaccggtatagaccggtatatcatcacaacgttcaatgatatcagcagcatcaccagtgatatgcttctgctcgcataaaagagctaaaggttcataaccggcatttagagctacattaataactttcggactttctgcaataaacagtcccttatcagactcgatacgattacgtagttgagcttcagtgagagtactgaatatttctattctgggatcagttaaggaatgtatttctataatgggcataggatttcttacaactatctacttaattacatcaaattataccaatgattgcatctactttttacttgcctatgcagcatgtgtacatcgttgattat

SEQ ID NO: 8418 - DNA, 545 bp, Unknown
  gut microbiota DNA sequence
tagagtctttagactctccttcttttactactttcttttccagtttaacacctgtaagtgtatcaactgcatagcatttatatactacgttcatttgagcttggtctatgtaaagcacagtaccatcgccgtaatcactctttacataaattcccttaaaaatctttctaaactccttattgtcaaaattgacacctaactcgttggctcttttaataatttcttttccaatttctttagcagctttatctctgaaagaaacgtgtacgctgggaacatatgtactaagtttacgaatggagtcttttactgaaagatcaacagctgtataagctttcgttcctaatagactgttatcagtatttgcatcgtaataatcctctggagtaatatctgtataataggcgttctttgtatctaaattttcatttaatgcatagacacttaaacggcaagctgttaatgagtctccaaagtaactgctataccacaaataaagctcaatagtatgaatgttgcctatgagttttctttttggatcattt

SEQ ID NO: 8419 - DNA, 573 bp, Unknown
  gut microbiota DNA sequence
atcgacttgtttacccgtgctgccggaataactccggctttgaatgtcggcagcaaagaaggacaaattcgtttcgtgacggattcttcttttaaaaccgaagcatatctgttggagattacaccgcaacagatacttattaaagcttcggatacaaagggtttcttctatgccctgcaatctatccgccaactcctgcctgctgccatagaatcagagcaaccggtacagaatatcgcttggaacgttcccgcaatgacagttcgggatgagccccgttttggtttcagaggattacttttggatccggtacgttgctttattcccaaagagaacgtactgcgaatcatcgactgtatggcgatgctgaaaataaacaaacttcattttcatctgacggacgataacggctggcggattgaaataaagaaatatcctcgtttgacagaagtaggagcgtggagagtagaccgtacggatgtaccttttcactcacgccgtaacccggagcgtggagagcttactccaataggtggtttctatacacaggaggagattcgggaaattgtagct

SEQ ID NO: 8420 - DNA, 965 bp, Unknown
  gut microbiota DNA sequence
ttttaacttcggcaaatcatgttttatcacgtcataaacaatttcagcatctaaatcaaaataatgatgtgcgattatatccctcattcccattacacctttccaatccatctctggatagaaagataataactttttatctgttaatttatcaacacctttcactccttcaccgatggctattaataacatacaagtactctctagtctttccattccggatggagtcaataaataaaaagaaggggaagtaatagtttccgagttcgctaatatcctttccaccgtttggaaaattttctttagcaatgattctattatctgacttttacacataaattccatctttattgatacaccctctcaataattcatccatattatttcgcaaccgaaccagatcaacagggcatttcaatagtttttccaattcttctttaatatgaactaaagtaaagatagaaggtctatcaatttcaacacaaatatcgacatcactaccctcatgttgttcaccacgagcaacggagccaaatatccccatgcgagaaataccatatttagcagcattcttgcgcatatactcacgaagcaaagataagtattctacagtagtcaacataataaattgcttttatctatattacaaagaaatgcattttctttcaaaaacacaatagataatcaataaaaaatattctaattctttctattatacaaaactagaaatctgaatattatctttaatcaataagcatggtattaaaaaaacaatatatcaacgatcttcacagacagttgatatatttagaatacatatcagcattttgccaatatgaggggacagatcaggaatataccgctgtatttttcccaacctgcagaatgtaggggattcatgtgtgtagcatgaagttagggacctacatatttcgttatattataggctaataatcttcagaagt

SEQ ID NO: 8421 - DNA, 382 bp, Unknown
  gut microbiota DNA sequence
aattcccatttaactgctaaattcccattaataaaacaaccaatccattgtctcttcatccccggcaagcccggcattacgaactttcgtttccgcagccgtgaatcctaacacttgcagatagcctttgggtaacatcaacgtatgctttccagccggaaaactatatgcatgcacatttgccaaaggcattccattgatacggacagcattcgtcaatacaggttccgcctgaccgtaatcattggctgacgcatcgatttccagtttcggagcttttgcatactttttctggtcgtctttgaaataagcgactaacaatttcaccggagcatccgtttcgaaagtgatgcttgtgcctttctctctctgctcatttcca

SEQ ID NO: 8422 - DNA, 673 bp, Unknown
  gut microbiota DNA sequence
agtccgctcctgtttccgcaaggcatctcgtgtaatagaccggttccacatccagaaattagcttgcgatgcagtgcaggaaatgcgtatcaaactccgctgggacgcaatccaggaagccaatgatgagatggaagaagcaaagcagaaaggggaatcatatgtgcctatgagatatgaaaatggagattcaaagaaagaactgttggcaagaagccgctatctgctgtttaaatcctccgaaaaatggaccccagcacaaaaacaaagagccaaaattctttttaaggaatatccggaattgggacaggcgtatggattatgtcattcactcagaatgattcttgccaaaaatacaatcaaagatgcggcaagattgagtatggctaaatggtataataaagtggaagaggcaggctttcatgctttcaatgtaattgcagcaaccttctatgaacattatgatgatattcttaacttttataataaaagatcctctaatgcggcggctgaatcctttaatgcgaaaatcaaacaattcagaaccgcattaagaggagtagtggatgagaaattcttcctctttagactggctaagatttatgcatacccccaatgattatcgggtgagccaatataaaccttatctacatttaaatcagtagatgtataa

SEQ ID NO: 8423 - DNA, 561 bp, Unknown
  gut microbiota DNA sequence
tgctataaccacctgaataaggttatgacatgatgaaaagtaaaatctcaagttattactactatgtttctgttctctgtttccagtttctgtatcagtaatccgctaaacgtatatacccaaccggtacatatttgaaagaaagtgaacgggcaattagtaatgctcggctttgatgttaccacctttacacctgcatcctatcaacgtcatcgtctttaacgaccctaagaaatctaatcttgtggctggcttcgtacttagatgctttcagcacttatccaatcccgacttagatacccagcgatgcacctggcggcacaactggtaaaccagcggtcagtccaacacggtcctctcgtactagtgtcagagccacgcaaatttcatacgcccacgatagatagagaccgaactgtctcacgacgttctgaacccagctcgcgtgccactttaatgggcgaacagcccaacccttgggaccttctccagccccaggatgtgacgagccgacatcgaggtgccaaaccactccgtcgatatgagctcttgggagggatc

SEQ ID NO: 8424 - DNA, 489 bp, Unknown
  gut microbiota DNA sequence
agtatgtaaggatgtgccgtatcttttccattcatgaagatacgtggatgcaacgcttcttcttcttccgaagaggcattaggattttcataccaatcaaacacaatagccattacttcttatcaatttaagtgtgtaacttcatcataggacaactttagttggctattcggacgactggaatcggctgttcagccaactattgtcagccaaccggacaactccagtcggcttctcttaaacaagtactaaagatacgacaaagtaacgacttatccccataagaaagcttgtttttcatttcaggagaaaataaacattttcttagttaaatacttgcaaaccccatatttcatgttataccttagcagcatcaaccggtcgaaaaaacaacatttattcatttaaaaagaagaaaaatatgaagacattagaatataactcgaaacgtttggcgaaaagaatacgggtattaatgaaagaatcgtc

SEQ ID NO: 8425 - DNA, 882 bp, Unknown
  gut microbiota DNA sequence
accatggaaaatattcatccttaataacttccggacatggataatttttcatccaatcggtgaaaacttctttccaagacagtatgtatttctcgtctttagtcatgtaatacgctttagcttgaggtaccatccactgatgacgatgacgctgatatttgaactcattatctgttatgccgtcaacctttaagtcccaatttattgttccatcactatttttgaaagaatagtaaatatctttcgactcgtctctaactccatcggtttctcctctagtttcagggaagttccttacataaaagcgatagtccagagcttgatttgcaatgtttagttccactgctgatgctgtagttcctaaaagagttacattcgggtttactacatctgtacgcatgcgataataatctagtaatgcattagcagctaattgatagtttcctgcttcatagtactgttttactttttctagacctttataatctagattgataacttcaaatagttttttttcaattccttcaccttcatcgggaagaatgttttctttgtcgttgttgggttctccaatgattaattcgtctttgtcgtctgtgcaattagacagaaagaacattgcgaataaacaaataaagatgttcttcatactttattaggttttaattattaaaagttatattttactgtttgcaaatgtaatctgtttatttagaaatgatgatttgtcctgttcacactttgttcaaaaaatgattttttgatattaatattgttgaatcatatattaataatgtttagaaaaacggtttttaggctgatattaagctttttatacatcataatgtaactttcatcctattcttttatgaaatgaactaa

SEQ ID NO: 8426 - DNA, 2173 bp, Unknown
  gut microbiota DNA sequence
gcgtatggcggtacctacatatattttgatagtagccatgttacgccatgccgtagaatccatgttacctattttgcgaagatatgcaaagaaagacaggagaaattcatgggtaatctctgaaaatacaaggccgggggcgaatgtttccagtttcttgatgatagaaacgtgatgtttccaggtaccgaaagaaattgttttgctaatttgtttgaggtaaacccgtgcaaaatcaaagaaggtaccaaaatcggaaggattgttatactggcggaagaaactttcttttgtcagcgtctcatttttaagacgggcacgaacaaatatgtcgcttacacgtgaccggatgtttgagatgattaaatttttgtctttactctctttgtcccggccttttatcacttcgttttgctcgtcccattctttggacgtgacacttaaccttaccgcgatccttattttctcacggttgatataaaattccacatacagggggagccggtcggttttgccttttttgccttgtcttacaactcttattgccgtcatttttatatgcctattttatgcctgtagaggggatatgcctacaaatatgcctacacaggcaggttattaaaagttaaacggggcgaaagtaaaacgtttaatatcagctatttaaaagaaaaatccgataacatttaactgttaccggatgttaatagtgattccgaagcgattcgaacgcttgacccacgccttagaagggcgttgctctatccagctgagctacggaaccagccttatttgcggatgcaaaggtagtgctttttatgaaaattcaaaaactttccggcacttttttattcatatttttctttatggctatgaatcagtaatttataaaagagaaatattttgtttagttatatggtttgggatgaataaataggaaaacgtcatttttacgaagaataacgaaagttatataggtttcaaaaaggtcaaaaaaataaaatacggttgtgtttttctattataacttctacttttggacgataaacaactaaaaaacacataaagttatgaagaaattgatttttttatttgcattttgtattgtagtgactaatgtttttgcacaaaccgccccagagcaattgaaaaaagaaggaaatgatgcatttaatgctaaaaattatccagtagcgtatgcgaagttcagcgaatatctgaaacagactaataatcaagattctgcaacagcttactattgtggtatagcagcagacgaagtgaaaaagtatgcggaagccgtgacctttttcgatattgctattcagaaaaaatttaatataggaaatgcgtatgctcgtaaagctttggctttagatgcacaaaagaagactgctgaatatgtagctacattagaagaagggctgaaagtcgatcctaagaataagacaatggtgaagaattatggtcttcattatctaaaagcaggacttgcagcacagaaagctggaaaagcagaagaagcagaagattgtttcaagaaagtaattccgttggatcacaaacagtataaaacaaatgcattgtacagtttaggagttttgtgttataatgacggagctaatatcctgaagaaagctgctcctttggcaaattcagatgcagacaaatatgctgcagaaaaagcaaaagcggatggaagatttaaagaagcattagactatttggaagaggctgctaagatctctccggaaaatgaaaatgtgaaaaagatgcttcctcaagtgaaagctgttatgaagtaatttgaccaatcttataaatgataaagggttgccggtatgatacgtcgggcaacccttttttattgctatctttttctaatctatactttttgcgtacatttgccattcctaaacgctgaaatattttatgcacttatataataaggaacaggccatcaaacggatgaatcagtttggacaacaccatcgtccttttgtttttattattaattatctgcaggatgcatcttatatagaagaggttgctgctgttgattctactgaacttttgtataatttgaatggatttaccaatcaagctacgtcaactgaaaagtatacaccttctttttctgctaaaccagcgaactctatccattggcagcctt

SEQ ID NO: 8427 - DNA, 476 bp, Unknown
  gut microbiota DNA sequence
caatccggacgttttagttaagtttatgctgaatgaaaaagacctccggttgccgttggaagcggttgaagcatcttattacaaatggaatgaggtttataaattctatatagaacattgcgacaaggtggaaaaatcacttgccgaaacattgaaattatcgtatgaagacttttaattataatcgtgctgaaataaaggccggaatagtacatttcggcgttggaaacttccatcgtgcacatctcgaagcttacacaaatctattacttgaagatccgtcacagagatgctggggggtattcggagccatgattatgcctacggacggggtcttgttcaacgccctcaagaaagacgacggcatatatcaattgacgacatgcagcccttccggcgaacaggatagtatgctgattggttcgcttgtagaactggcatggggggaaatagatagtgagcctatcatcgctaaa

SEQ ID NO: 8428 - DNA, 1026 bp, Unknown
  gut microbiota DNA sequence
cgcgaatggacaaaaccgttccatgaagccggtattcaaacccacatgctcgaccgcgcactgaacggactccgtatgagccccgttccggcagacgtccgcaaattattctacaaagtaaagaaagcacaaggaacagacattacccgtacgttctgcggattgaacgacgtgcgtaacattgctccttccatcacatacgcaaaggaagcaggcatgatttcgcaatgctcgctttgcatcactcattcgcctatccataccgtagagtactacaccaatatggcgctggaacttatcaaactgggagcagacgaaatctgtatcaaagacatggcaggtatcggccgtcctgtatcgttaggtaagatcgtagcaaatatcaaggcggcacatcccgaaatccccgttcagtatcacagtcatgcaggtcccggattcaatatggcaagcatcctcgaagtatgcgaagccggttgcgactacatcgacgtaggcatggaaccactatcatggggaacaggccatgctgacttgcttagtgtgcaggcgatgctgaaagacgccggatatcaagtgcccgaaatcaatatggaagcctacatgaaagtgcgcggcatgattcaggaatttatggacgacttcctcggcttgtatatcagcccgaaaaaccgtctgatgaactctttgctgattgctcccggacttcccggcggtatgatgggtagtttgatggccgatctcgaatccaatctggaatcaatcaataaatataaggcaaaacacaatctgccgtttatgacgcaagaccagcttcttatcaagctgtttgatgaagtggcatacgtatggcctcgtgtcggttatcctccattggtgactccgttcagccaatacgtgaagaacctcgccatgatgaatgtgatggctatggaaaaaggaaaagaacgttggggaatgattgccgatgatatctgggatatgattctgggtaaagccggacgtctgccgggcaaacttgctccc

SEQ ID NO: 8429 - DNA, 756 bp, Unknown
  gut microbiota DNA sequence
cttatgggttattacagatgaatgatatgcatcaatagatactgatgacacttcatccccagccagtccctgtgctttcagaaacaaataggccatgaccatctgtccgtcattatccggatgaattctatctatcctgcagaatgtaaatgtagaatctgcctcctgctcttttctgcttatctcacgcatcggttggttaaaatcaacaaaaccccagccattctttttagccgatgtacgttgggcatctatgatttttaaaatggcgttgttcttattatgcaatataaaattattaaaccgggaagtctcatcataaggagaaccaccaatcaaaactttctttattttatttttagccagtaagcgttcttctatttcccgatagctttccaatgactttgcaatccgttgttccgacagttcttttgcatcgtctttcatgtaaatatcataaccggtatcattcataccgaaagttagagtcacataagttggtttcctgttgaaaacatcatagtccaagcgatccttcatatcccacgcactctctccaccaattccggcattcatgatagtaatcggtttatccgggaaacgagtcatgtaatacaaccagataaatgaatgataatgtccgccgtgagtaatgctgtttcctacaaataccacacgttccccttcttcaaaccgaggtattgttgtttgtgcctgtaagtaatcgcaatttatataaactaaagataacaacaa

SEQ ID NO: 8430 - DNA, 614 bp, Unknown
  gut microbiota DNA sequence
gttagttcaacttagtgtttatttggggaccttagctgatggtctggattcttctcctttaggacatggaccttagcacccatgccctcactcctgagatagaactaatgcgcattcggagtttatcaagacttgataggcggtgaagccctcgcatcttatcagtcgctctacctcacattagtaactctcaaggctgcacctaaatgcatttcggggagtacgagctatctccaagtttgattagcctttcacccccaccctcaggtcatccggaagcttttcaacgcttatcggttcggtcctccagttagtgttacctaaccttcaacctgcccaagggtagatcacttggtttcgcgtctactccttccgactatccgccctgttcagactcgctttcgcttcggatccacatctcaagatgcttaaccttgccggaaaaagtaactcgtaggttcattatgcaaaaggcacgccgtcacagctgaagctgctccgaccgcttgtaggcgcatggtttcagggactatttcactcttctattcgaagtgcttttcacctttccttcacagtactggttcgctatcggtctctcgggagtatttagcctt

SEQ ID NO: 8431 - DNA, 2221 bp, Unknown
  gut microbiota DNA sequence
cccgtaaaatcatattccgttcgtcctgcctgtacgtttttcagcacgcccgacaacttatccattgtaatctgtgcggctaccggaatataaggatttatactctcactctgtatgccatcctttcttacattgttgtttctaattgttgagacagcatacaatagaatgaatactacaatagggattataaattttaaaatcttggtttgcttaatcatatttattgctattctatatactttcattttttactctgttggtaatgttcggcaaataatcgaatattaaggtgctttatctgtttgttagcaatctatttcatttccatttaatgattctatatctcctaatgctttatattctctgtccaaatcttcttttgtgaataggtaatagttatcctcaaatcttggcatatcatatccttttacaaaagataagaaagagaatatttttgcatctatatctataccttgattacccttgttgtccaaagtaaataatagattatcagctttcatcgaaactctatttctaatgccttctacattatattcttcgttatcaggtaactctttaagtatctgatagaagtttattatctgttgttttactttcattcttaatttgattagtgatatgctaatgcttgacagcgtgccgctttaagcggtatgctgtttgttagtaacccatttcaccattcttcaaagttctcttctataaaaacttcaagtgatgaagctaaaatttcattctctccattatcatgataaaatattagcacttctcctttaggattaatcataattggatttcctgctccatcatctgcaacagcatagttttctgaagtttccgcatgaacttctctcaaagattgagtataacctacaacagtttcattaccttcaaaagcaaaaatttcaatgtctgcccaagcacgaccaaagtgtttgataaaatcaatatagtcagaactaaactttacattcaacactttttcggcttgttctatttgttcgtccgtagcgggagtaccacgcattttatgtttattgagaaatgtactcaatcgttctataagtttttgtttcatattcttcgctatttttatggttactaatgtccggcagcgttccgcttattcagtcggttagctatgtgttatcggtatccaaatatttttataattagtttttcattatcaatatcatattcaaatttcccaatcttttcaattaaatctttcattctggataattcgtttattgattcaaaggggataatgacatattctatattcttagtccttattgccccagctatgccatctgctgtgtatttcccattcccaagataatctgcaagaagtatatgccaaagagtatcacacacaagatcttttgcaaggacttcacttgcaatgtacttaatatctgattctgcaatagcttttagtaacttagaccatttggcattgctcatataactactttttaaagttactgctcttttagtcattttatcatagttcttcatctataatatgaaattggattattctcattattttaataccgataatggctggcgaataactgattgttagggcagttcattcgcttgttagcaataacttattataatccaaaataccattccaaaaaagaattgaagtctttccattgtggagacaactttccattctgaaaattgattagtttctctcccaattcaatttcaagaacttctcctgtattacggttatagaaaaaaccgccttcaccttcaaagctatcaagaggtaagtattcggagggaatgcctaacactgcttgcctttctataccataacttaaatcattagagtaaattttaaaccaacacacattatagatttcgccacattgtcctcgaaatgttatttcggtagtatttagattaaacagtgcaaaatcactatttaaatcaattcctaaatcaatcaaagcctttttatatgctttatcttctttttctgaatatacaccttgtttattcaaatagtctatcactttattacttagcatgatttgatgatattttatttgttttactttattgctaatgtcagtggctaaccgactttttggggcggttaagccatttgttaatcgttttacaaaacctctaagtcatttatttttatcttattctcatttttgaaacaagaaag

SEQ ID NO: 8432 - DNA, 457 bp, Unknown
  gut microbiota DNA sequence
cggatcattctcgacatccccttcgtgatgaaatagtttttcatattcatacaggccatagggactgttttcgatgatatattcactcgtttttgcagctagttcccatctttcgttttgcaaggcaatacgtgccaatatggctaaagcgccccaacggtcgagtcttcccagtttgtcgcctgtatacctttcttcaggcatgcgctctgccgcccatttcaaatcctcgacgagctggtcaatgactttctctctgggagtacgttcgatatatgcatcttcgggctggatgacttctcctacccaaggtacatcaccccaaaacaccgtaaggtaaaagtacataagcgcccggatcgtttttacttctgcggcataaacgtccttcttattttgagctacctgcgctttattatagttgtccagaaaattattgcagcgataaatatagcta

SEQ ID NO: 8433 - DNA, 427 bp, Unknown
  gut microbiota DNA sequence
tggcaggaggtcggaatagacttcacagaagaagtcgaagcggatttggcaatgtgcatccagtccttttcgataatcgttcagttcgccggtgatacctgaaaagttgaggtaaagcaccagatagctgttgcggtttgctgtgggatgcttcccaatgtagaggtcgccgaataagtcgttgaacttatcgcgggtacgcacatcgtagtagtgttgcagtacgttcagcgtgaggcttttgccgaagcggcggggacggatgaagaaaaagaaccggtctgcctgctctatcataggaatgaagcgggttttgtctacataataatagtcttcgcggcggatgactgcgaagttcatcataccgtaaggtaaacgctttctgttgggtactatatattccattggatccatcttctgtcctcct

SEQ ID NO: 8434 - DNA, 1051 bp, Unknown
  gut microbiota DNA sequence
tgtgaaagcactgaaaggtccgatacatctgaccacttatgtttcgttgacttgtacgaactgccctgacgtagtgcaggctctgaatgcaatgaccactttgaatcctgctattgcgcatgaaatggtagacggtgcgctttatcaggacgaagtagatgcactgaagatacaaggagtgccctctgtctttgcagatggaaagttgcttcatgtaggccgtggtgaatttggcgaattgcttgccaagttggaagaacaatatggtattgacgaaaccaaagcgaatgcagaggtgaaagaatatgatgtgattgtagccggtggaggacctgcaggagtatcagcagctatttattctgcccgtaaaggactccgtgtagctatcgtggccgagcgtgttggcggacaggtaaaagaaacggtgggtattgaaaatctaatttctgttccggaaacgacaggaaatgaacttgccgataatctgaaaactcacttgttgcgttatccggtggatttgctggagcatcgtaaagtagaaaaagtagaagtggttggaaaacaaaagcagatcactacctctgttggggagaaattcctggctccggcactgattattgcaaccggtgcaagctggcgtaaactgaatgttccgggagaagcggagtatatcggtcgtggtgtcgctttctgccctcattgtgatgggccgttctataagggaaagcatgtagcagtagtaggtggaggaaattccggcattgaggcagccattgacttggctggtatctgctccaaagtcactgtttttgaatttatggatgagttgaaagcggacagtgtacttcaagagcgacttaaatcattgccgaatgtggaagtgtttgtaagttcacagactacggaagtgataggaaatggtgataaactgactgccctgcgcatcaaagatcgcaaaacggaagaagaacgtttggttgagttggatggtgtatttgtacaaatcgggctttctgcgaatagcagtgtattccgcgacatagtggaaacc

SEQ ID NO: 8435 - DNA, 356 bp, Unknown
  gut microbiota DNA sequence
gttttgtttccttttcagatgtttgttccatcaaagtagacataaataaaggtattcgttatttcttgattaaattagcaatagaggcaatcatcattcccaaggagctgaaagaagtggcatatcccaggatttctcccatattagtacgcttctttgatttactaggaacaatgatctcacaaccaggctcgatctgtttcttaccgctacctttaaccttagttacctgaccattcatataaacaatgaacttcttgctcttcttcgcattgtctgaataaccaccggcctgattcaaataataatcgatattcttaccagctatataagaaacggtattaggaaccatgaca

SEQ ID NO: 8436 - DNA, 624 bp, Unknown
  gut microbiota DNA sequence
ccttgcggtgcctttttcacttccagaaaatctgtcaaacgttgttcgatagtcttcagctccttcttttgttcgcttgtcaatttagaaggcaggggaatatcatacgactgttgttcccatttccacacgagacaccaatgccacaggtcacgattagacagcccattattggtaggcaactgttggtcgggagtggtacgaagattcattttcttttccggaaaaatcagacggtcaagaaagatacgtcccttccgttgcggggcaaccaggcgataggctacaatcttcttatctttcttgtcgccctgcatatactcaaaagagatccagcaagcccgccaacctgctgcctgcaaacgataagagaaccagtaagagacttctccctccttattcagaaactcaaaacgaatagaatcctgctgcggtttctcattataaatccacaaggtaatgccgaactgcttctcgtttctcgtattcaacgataaaggagcaatttgaacatccagcgtagaaccaggctgaaagtcccattccagactactttcaccctccttgtaaaaaagagaagagattttcacttctccctttccggaaactttaaatgcttcgggc

SEQ ID NO: 8437 - DNA, 426 bp, Unknown
  gut microbiota DNA sequence
aggatgtttcacgtccaacttcacagttggactattgcatggtttcccggttatctggactttggcaaccttgggctgctcaacctggactgtcttgcctaacttctcactccacaactggtgacgctgccagttcatgaacttgtcgtaatttacaccataatcagcacagaactctcgaagatctttggtctcgctgcataactggtagaggtcatatacctcctgatagtttactttttcttttgccataatcattcttgttaaaggttacggcgcaaagatatggcggctaacaacttatgtcaaggcggaaaatagaatggttactatcttttttatcatttgaaatctgtgtgaatctgtgtaatctgtggtgaaccttaccaacttttaatagtggaatatataatgatcccgagcact

SEQ ID NO: 8438 - DNA, 1392 bp, Unknown
  gut microbiota DNA sequence
cacgtgatatgcttggtgatgccgcaacgcttggcaacggaacggattccggcaaggcacgtgttgtagtggggaacggggaaaatcctgccgttcccgcacagtccccggtatttgtcgatgatgcgctttgcgatgtcgagcaggcggatattggacaccacgcccgtcttctggcggttgatgtttatccactcgtgttcgtcgaagtaggtatggatgttctcttccgtcaggttgcgcatgtcggcgaacgacaagcccgtgaaggcgcagaacaggtagaggtcgcggtaaagctcctgcttggcgtttttcagcctgccctccatcagcagccggatttcctctttcgtcaggaaactgcgtgtggtttcctccttcttgatttcgtactcccggaacgggtcgcgtgtgagccactcgttgttgatggcgatgaacaccatcgtccgcaaggggcagacatacagccacacggtattggtgcagcagtgcttgtccgtgcgcaggaacatctcaaagtcggagatgaaggcgggcgtaagctctttcagtgcaatatccttcacgcggtagcggatggtgaggaactcttgcaggtgcttgtaaacggtcctgtacttcaagagcgtgcctttggctttcatgccggcctccacctgtttctcgtagtcctcgttgtgctggcggaacacctgcatcagcgtgtggtagcggtgttccagtccgagaaaggcgttcttgaccttctccgccgtgacaaagttgtcacgctccatgatttcctgatagtgtttgttgatacgcacacgcatcttgtcgagcatgcggttcgtttcgagtgccgccgagcttctgcccgtgacacgtccccctttggtgtcccacagcttgggatcgacggtcagcttgcagctgaactgcgtctggctgccgtccaccgtgatgcgtcccatgacgggtactgtcccgtcctttttcactacctgacgcttgaggtagtagattactgaaaatgtactcttcatcgtccttaatttttttaggttcaaaattagttggtgaagagtccggtgtcggtacgcaaaacggggaggaacggcgcaatctttttccgtaaccggatttgttgcgtgggttgtcagtaactcactaatccttaacgtcttgtttcgccatccgtgtccgtttgtcgcccttttgggtatggttacggacaagtaacgtagcggcgtcctgatttggcttcagcggtgattgcgatggcttcacgaataatcggaagtacaactgaaacccctgtaactcaattctatcactatatctttccgcatttcacttttttgtagtaactttgtgtgccaaagatacttctttttggctttagct

SEQ ID NO: 8439 - DNA, 446 bp, Unknown
  gut microbiota DNA sequence
gtgtccaccgccttagcgaatttcaacacggaaggcgtcatcgctttaatatcctctttgaaaaatcccagcttggcaagctctatctgaagtgccgttacctgtgcggccgtataagaagtagtagcacccagccggcgcgcttcatccgttaaatccttgatactttttttcgtagttcccaggatagcggccaacgtactgtttttcttctcgaactctataatagtactgatcgcatcccttagcccgccgacaatctgcccggttatcattgcgccgatagtgacaaacacaccggccagaaccgtttttatcttgttcaaggaaagaagggaaccgccgaaaccttccgccttcttcgttgcctgcccgtatgctttttcaacttctttcagttccttctccagggcggcatatttttccggctgcaaggatttcaccgt

SEQ ID NO: 8440 - DNA, 2450 bp, Unknown
  gut microbiota DNA sequence
tccgtaaaaatcataatatttttggatttacctctctagttgtttatccctttgccttcttaatatactctgtaggcaaacatccgaaatactttttgaaactcgtagcaaagtaagacggcgtattaaatcctaccattgtgctgacttctgctattgtataacggccatccttcagtagttttgccgcttcattgaaacgaatcttgcgtataaagtcgatagtcgattcacctgtgatagctttcaatttgaggtgcagattagaacggctcatattcatttctctggcgaactcgtcggtagagaattcaatattatccatattcttttctacgatggcaacggcacgtttcaacaaagcttcatccatggcgttgaacgtaatcttttccggttccacttccagagatttggaataccgttcaagcatacgcctgcgggtacgcatcatattctgtatcttcgtagtcaggatagccagcgagaatggtttcgggatataatcatccgcgcccatttgcaggccttccatctgatctttggtttcgcttttggcagacaggataatcacaggaatgtgacaggtacggatattctgcttcacattcttgcatagcttgataccatccatcacaggcatcatgacatcagtcacaataatgtccacttcattctctttcagcttttccagggcttcttcaccatttccggcttccagtgtattgaaaagttcggcaagtccgctacttagataatggcggatttcattattgtcttctacgataagaatcgtaccacgtttcttgtcaccagtttcgatcgtttcgttttctactttttccgtatcaatgaaatacatctctttcgagttggtagaataaacttggtcctcttcatttttagcgtcattagaagctaattcggaagatttgtagatgtttatatcctgtggcagataaacagagaaagtactgcctttgccttcttcactgtctaactcaatacgtccgtgatgcagttccaccaaacgttgtaccaatgacagcccgatgccacttcctacgtgctcactctctatctgatagaaacgttcgaatatttttccctgcttgttgataggaataccaataccggtgtcactaacttgcagtaccagccaattgttttcctctttcaacgtaacagtaatgctttgcccgctttctgtatatttgaaagcatttgaaagcaggttattaacgatcagttccagataattcggatcgaaaagttcctctttttcttccagttcggagtggagagtataagtaatcttcttgtggcgtgccagtttatcgtagaacaagaaattatcctgtatcagttgatgcgcattctctttcttcactttcagctcaaaaactcccaattcggcacggcgataatccatcaactggttgacaagatgcaacagacgattggcgttgcgttggatatattccagctggttacgagtccagcgatcactaatcttattgattatttcttgtaaaggagctaagatgagagttaacggcgtgcgaagctcgtgcgaaatattgatgaagaaacgcattttcatctggttgatttcttcttgatgctccttgtccctgcgttcaagttccagttccgcttccatgctcttacgcatccagaagaagcggaagacgaaagtgataaaaccgataaaagtggcgaggaaaatcatgattgcccaccaggtcttgtaccagatagggagaactatgatttccaacattgtaggtacagtattccattttccgtcactattggcggcttttaccaaaaagtgataagtgccttgtggtaggttggagtaggagacagtacgtttatctgtcagataataccactctttgtcatatccttccagtttataagcgaaagtgttatgttgtccggaaatataattggatactacaaattcaatcgtgaaagtagtttgccatgatttcagggtgatactttctgtctcattgatattcttagtcaggataccggtttcatcatccgggcgaactgtcttgttaaacagttgaagtttagtgataactaccggaggcgtataagggttatccagcaatagttccgggcggaaagtagtgatcccgttgatacctccgaaatacatctgaccgctcgaagtgcgacagaacgaagaagtattaaactgattactctgtaacccgtcggattccgtaaaattacggaacctctctgtttccggattgaaacaggaaatgccacggttggtacttacccaaagacgtccgaaagtatcttccagaataccatataccacattgttgggcaaaccgttagccgtagtatatcgtttgattttcttttctttctcattaaaacagtagaagccttcacgcgtacctacccaaatgataccgttg

SEQ ID NO: 8441 - DNA, 12686 bp, Unknown
  gut microbiota DNA sequence
gtaaatgcaattggtaaacgtctttgttacagatgattccggcagaataggcaccttttctatctcgattccttcctgctgaaagacagatataccttcctcacccccgacccaaagccgtttatgggaatctctgaacaggattgtgattcgttgtgaagtaaatggagtaccgtccttttccttatcaatggtggtaaaactctttttttccgggttaaaactaaccagagcacttaatgtccccaataagagattccctcttttgtcaggaagaatagcatatacattctcattcaccaactggctgttcagctgattgaaactttccatttttccactgtttcgatggaggacagtcagtccgccggcatgtgtccctatatatacaagtgatttttgttcatctacatatacggctttgatattgttggaaccaataccgatttcccgttcgtcttcctgtaagatatagtgcgtaaactgttgtgtctttgtattatacagattcaaaccaccatcattcgttcctatccataaattcttattcttatcttccgtaatgcagctgactacgttatcgcttagagaattcttatagggaatacgctggatattcttgaatctgttgcggataggatggtaatagttcaatcccccgaaataggttccaagccacatacctccttgcgaatccataaagatactgcgaaccgaacgttgtgacaaactgccgttttctaccggactgctactataggatacgaaagaatcgcttccttcatgataaatgtttagatcattgaacgttcctatccataagcgattttgcgaatccagtgccagagagcggatataattggaactgatacttttaggattggaagaagaatgatggtaagccttgacctctttcgttttcgggttgagcagaagcagaccggctccttcggtagctacccatatacgggtaggagattgctgcaaaatggcctgaatctgtttcgtttccgttatcggagtaatcttttccagtttcttttgaggaatggaatagctgtaaagcccgtcgaccggggtaccgatatagataatatccccctgtctgtaaagagctgaagctataagcttgtgcatagcggtactaaaagaatcgtcaacgaatcgtgattctttaatatcgaacatggtcagtccttcctgtgtgcttataagcaactgttccggtgagatttctgcaataccattgatttgttgccgtttgccctttttctcgtagaagaaatttctgaatttgtctttttcttcgtcataatatgacaaaccatcccgcgtaccgatccagacacgtccctgactgtcagtctttacgattcgtgaaatgtcattagcaatactgttcggatcctcttcattatgttgataaactgtaaatgaatacccgtcatacttgtttactccatcataggtagcgaaccacatattacctctttggtcctgatcgatagagaatacggtgctttgtgacaatccttcgttaatagaaatataagagaagttaatttgctccggaacttcagaaaaaacgcaattaacccctatacatagaaagagtagacagattgttgtttttttaaggctgttcattattagttcataagattaataatggcatcaaagatagcaaaatcttttatatggaggtattcaatagagagaaagtaaatatagggaatgaaaaaataccaccaattatacagattagcacggatttttatatcgacaatcttcgaattacaattaaatctgtgttaatctgtgtaatcggtggtgaaacttgaaactggtaggtaatttattatttagctaaatctcctatctcgtctaaattcttctgaatatcttcgtcattcaatgtataattcaccagatcaccggccaaatacttgtcataagaagccatatcgatcagaccatgtcccgaaagattgaaaagaatcactttttcttctcctgtctccttacatttgttagcttcgcggatagccgctgcaatagcgtggctggattcgggagccggaataataccttcagactgcgcaaacagacaaccggcttcgaaagactccagttgctgtatatctaccgcttccatcagattatctttgagcaactgtgaaacgattacacctgcgccgtgataacgaagtccaccggcatggatatgagccggagcaaaattgtgtcccaaagtaaacatcggtagtaacggagtatatccggcttcatcaccgaagtcatactggaacttaccacgtgtcagtttcggacaagaagcaggttcggcagcaacgaaacgagtctttttcccttcctgtatggtgtggcgcatgaacgggaaagagatacctccgaagttggaaccacctccgaaacaaccgatcacgatatccggatattcgcctgccatttccatttgtttttcagcttccagtccgataatagtctggtggagagtcacgtggctaagtacggaaccgagcgtatatttacagttgggagtcatttgtgccagttcgatagcttccgaaatagcagttcccaatgaaccttgataagtggggtgtttagtcagaatatctttaccggcgcgggtagacatagatggagaaggagtgacctgtgctccgaaagtctgcatgatgctgcggcggtatggtttttgttcataactgatttttacctgataaacggcagcttccagaccgaaaaccttggctgcgtaagaaagagcggctccccattgtccggcaccagtttcagtggtgatgttggtcactccttcttctttgcaataataagcttgtgccaatgcagagttcaacttgtgcgaaccgatagggcttacgctttcgttcttaaaatagatatgagccggagtgccgagtgctttttccaaaccataagcacgaaccagcggagtgctgcggtagtacttgtacatttcacgcacttcttccggtatttcgatccatgcatccgtctgatttagctcctgatgacacagctcttttgcgaaaatcggatataaatcttctgctttcagcggttgtttggttcccggatgcaacggaggcataggcttgttcaccatatcggcctgaatgttgtaccagtaatgtggaatttcttcttccggtagaatataccgttttcttttttcactcataatattgtagttttttagttttctgttgccaaaagtagtcaaatttttaatattcagaaaattttgtcaacaaagaatcgtgtttgattgttattttagttaagtttgcacgaccctgttaaaaaagatgatatgaagatttatcataagtttttattgtatcagaataaactcctaaaaccctatgtacgtattttgttagggctgatagaagcactcacttatctggcgtctttatcattgattgttggagtagtatatgaacatggctttcccttgtctattgatgaagtggcgaatttacagacattgtataaaactgtttggatcatctttctgattgatgtaactttacatatctcgctggaataccggaataccaaaaaacaataccggcgattagcttggatcttgagtgggttgttatatctcactttagtacctgttatattccatcgtccggaagaagaaggagctattttgcatatttgggaattcttacatgggaagttttatcatcttttgttattgttagttctttctttcctcaatctgtctaatgggctggtgcgtctgttgggacggcgtaccaatccgtctttgatattggcagtcagttttatggctattattctgattggagcaggcttgttgatgcttccgcgctgcacggtaaatggtatcacctgggtagactctttatttaccgctaccagtgccgtatgcgttacaggcttggtaccggtagacgtgtccactacattcaccacttcgggattagttgtcattatcctgctgattcagattggcggattgggagtgatgacattaaccagtttcttcgccatgttctttatggggaatacttccatctacaatcagcttgttgtgcgtgatatggttagttccaattcattaggttctttgctgtctactttattatatatattaggcttcaccttagtgattgaagggatcggcatggtttcgatttggtttagtattcacggaacgttgggaatgaccctggaaggagagttgggttttgctgctttccattctatttcagctttttgcaatgcgggtttttctacgctttccggcaatttaggaaatccaatggtgatgactaatcacaattggctgtttattactgtttctctattgattatatttggtggtatcggtttccccatccttgtcaatttcaaggatattgtattgtatcacctccgtcgtttctggaaattgattcgtacccgcaaactggatcggcataaaatgcagcacctctataacctgaatacgaaaatcgtgttaatcatgacttttctgcttttattaatcggcacattggctattgctgcttttgagtggaatggttcttttgccggtatgcctgtggcagataagtggacacaagctttctttaatgccacttgtccgcgaacagccggtttcagcagtgtcgacctgacatcattgagcgtgcagacattgttggtttatctattcctgatgtgggtgggcggtggatcacagtccacggcaggtggtgtgaaagtgaatgcttttgcggtcgtagttctgaatcttgtagccgtattgcgtggcactgaacgagtggaagtgttcggcagagaattgtcttacgattcaatccggcgttccaatgcaacagtagtcatgtcattgggagtcttattcatttttatttttacattgagcatactcgaaccgggtgtttccattatggcattaactttcgaatgtgtttctgcgcttagtaccgtgggttccagtctgaatctgacccctcatttgtgcgacgcgagcaaactattggtgtctttgttgatgtttattggtcgtgtggggttaataacattgatgttgggaatcgtcaaacagaaaaagaatacaaaataccgttatccaagtgataacatcataataaactaaagctatgaagtatattattattggtttaggaaattacggccatgtgttggcggaagaactgtccgccttgggacacgaaattataggtgcggatataagcgaaagtcgtgtagactccatcaaagataaggttgctacagcttttgtcattgatgccactgacgaacaatcattatcagtgttgccattgaatagtgtggatatagttattgtagcgattggagagaattttggtgcgtcgatacgagtcgttgccctgttaaagcagaaaaaggttccccgtatttttgcccgtgctattgatgccgtacataaagcagtgcttgaagcttttgatctggaacgaatcctgactccggaagaagatgctgcccgcagcctggtacaactgctcgatttcggtactaacatggaaggattccgcatcgatcaggattattatgtggtgaagttcacggttccggagaaatttgtaggatattttgtgaatgagttaaacctggatgaagagtttcatttaaaaatgataggcttgaaacgggcgaataaggtcaccaactgcctgggtatctctctgaccgagcttcatgtgaagaatgaattaccggaaaatgagaaagtggaagaaggagacgaattggtctgctacggcaggtatcgtgattttcaggccttctggaaagctatttagctagagtacttataacgtcgcttttattgagcacaagtgagcaagtttcggagatagttgtatgaagaaacccatcggacttcttttcagtgaagaaatccggtgggtttgttatatgctgaagcgtatgccttatttcgtctgaatacgaatatttccggctttcactccgtttgcttttgctgtaaatacaatctctccggcagtttcaccggcttgcaggatagctgtcaacatgccgttgaaagcatgcatcttcggaagatggaattgttcaaggttcgtcggatcgccattggcggcagcacgatatttacctgttccctttaccgagaaatttatctgacgattatcggctgggcagaggttaccgtctttgtctactactttaacagtcacataagccagatcttttccatctgcagtcagttcgttacggttgcttaccagttcgatgtgatgaggctttccggcagtacggactactttttcagctaccgcttttccgtttttgtcgtaggctactactttcacttcacccggttcgtactttgtatccatccacatcaggcgatagcggttctttagcgaactattattcttgctttgttttccatagcttttgccattgataaacaattcggcagtaggataattagtgtacacaaaaacgggagtcacttcaccttcacgtcccggccaggtccagtgaggcaggatatgcaaggtttccgctttcttgttccacacgctacggtaaagataatagcggtctttaggtaaactggcaaggtcgatgataccaaacattgaactgtggttaggccatgaatccgtatcgtatggtgacggttcacccagataatcgaatccggtccatacgaactgtccgatggtccaatgatgatcgtcagctaatgcaaagtcctcgtccggaatattcgaccaaggacaaacctccacatcgtatgaagagcattgatgatcttcatattttgcacctttcttatcctccaccgggaacttgtacacgccacgtgaactgacagtagaagccgtttcgcttcccagaatcagattctgcgggagttggtcgtatgactcctgatagcgttgcgtacggtaattaagtcccggaatgtcaatcatcgctgcaaatccgttggcaagtacacaagtcacctggtccattccgcaagtgacaggacgggtaggatcttcacgatggcagatatcctgcaggaatttggccactttataaccgacaggactgcattgagtcggtacttcgttgccgatactccacataacgacgcaagggttattccggtaattatgaagcatatttatcatatcacgttccgcccattcatcgaagtagcggtgataaccattttcacatttggcgatatcccattcatcgaacggttcgatcatcatcataaatcccatttcgtcacacaacgcaacgagttcgggagtcggcatattatgagaagtacggatcgcgtcgcatcccatatctttcaatagcgtaagctgatgacgcagtgctgcaacattgatagcggcgcccaacggacctaaatcgtggtgattgcatacaccctgaaatttgcggtgctccccgttcaggtagaaccctttgtcggcaatgtattcaatgctgcggataccgaaacgtgtggtgtaagtatctaccagtttatcatccgcataaattttagagacagccttgtaaagcgacggactttccggcgaccagagttcgggcgcgtttacaataaaattttgttcaaaaggttgtccgtgattgatgcggcttgtattctctttccgggtaacaactttaccttccggagaaagaatttccgtctctacacggatggctgttttctcaccggcattgtctatcttcgtttggagacgtacggctgcaaaatccttgttgacgtgaggagtcgtgatttgcgttccccatacaggcacatggattttgtcagtcacaatcaggtgtacattgcgatacagacctgctcccggataccaacgcgaagattgcggacggttttccaaacgcacggaaagcgtattgtttttaccgtctttattcaataaggaagtcacattacagtgaaaagaattgtagccgaaaggccagaaacaagcttcttttccgttgatgtagacacgcgcttcactcatggcaccatcaaaaagtagtgtcacttctttgtcggcaggggcgtcaaaactggtacgataccatccggtacctacataaggaagaccgccggtacgtcctgtcttcaaggaagcttttttctcaaagttctgtgtcactgctacgttttggaggtcattgttcatgtcgaatggaccaaaaatcgcccagtcgtgtggaataacaaccgattcccatttagtatcattgaactccggctgactggcctctttaaaatctcctttactgaatttccagttcttctccagcagtgcctcactgcgttgcgcttgcatagtgcaggcggcggccatcaaaagtacagctaataactgtttggggtgtttcatgttcatttttacttttcaggtataaaatattttggattcggcgtaaagttataaaaaaggattcaataatcttatctcttgaaagcattaaatgcactggccggtttgccactgttgtcaagcccccctttgtgatagcctttccattccttctttccttcaaatgtaggaaaaatgtcggttacacttgtaaatatcccgctctttttgttcctttgccatctatttataaacagaaaacttacgtatgagaaaactagtttattggcttttattgccgttggcagtggctgtgagtgcatgtggcggtaaaaaaggaacttcagataatcagtcgctactggcaagaatagacagtatagatgctcacggattgcagcgtatgcagacgtctaagagcgaaactaactttaagttcaaaggaaaagattatcattcctttgtttcacgtactccggacgaaagtctgcctcatgtaacaaatgagatgggagatacttatgtcgacaataaaatagtgctgcacctgacacgcggtaacgaaacggtattgaacaagacatttactaagaatgatttttcatccgtagtcgatgcaaaatttctctcgaaatctatattggaaggaattgtatacgacaagaccactccgcagggcattgtatatgccgcaagtgtttgttatccgcagacagatttgtatatgccgctttctataacgatcaccgccgatggaaaaatgagtatacggaaagtcgatatgcttgaagaagatttgaacgatgaagcaccgaattaagcctccaggcaggtgttgacagcaaaattacacaaatgtgaaagcatttgagacaaacgaaaggcaactgatgaggttgcctttcgtatttttgcaccgtcaacaaacttaatatcgaatagaatgaagaaaagcatttttattatttgcgtgctggcatcaggatgcacggcgatggctgaacaagtcgagaaacccggtccggctatagaaacacagactttggtgccactgaccgagcgtgtaaatgtacaggcagattcggcatgtgtcaatcagattatagatggttgctgggtagcagtcggagctaaaaaagcgcatgccattcaacgtgatttcaaccttatgttcaacggaaaaccttcttatcgttttgaactgaaagaagatgataacacattatccggatatgcagcgggggaaacaaaagggcgtgcggaattttcttattgttatgcaacttccgatgatttcaaaggcaaaccagccgatacatataagaaagcacaaataatgaaaactgtatatcatcatggaaaaggtatttgtccgcagggtgcttcccgcgattatgagttttcggtatatatcccttctacattaggcagtgatgtttccaccatttttgctcaatggcatggaatgccggatcgtactttggtacagactccacagggtgaagtgaagaaactgacagctgatgagttcatggaactggacaagactactatttttaagaaaaacatgggatacgaaaagaaacccaagctggacaagcaaggtaatccggtgaaagacaaacaaggcaatcccgtttatcaagccggaaaggccaacggatggctggtggaacaaggtggctatcctccattggcattcggattttccggcggatggttttacatcaaagcaaactccgatcgtaaatggctgactgataaagacgaccgttgcaactcaaatccggaaaagacaccggttatgaaacctgtgacatctacatataaagcatcgaccattgcttacaaaatgcctttcgccgattttccgaaagattgttggattacattccgtattcatatcgattggacagtctatggcaaagaggcagaaacaattgtaaagccgggtatgctcgatgtacagatggactatcaggaaaaagggaaaaaggttaagaaacacattgtggacaatgagaaaatcatgattggacgtaacgacgatgatggttattactttaagttcggtatctaccgtgtaggtaatagcacgaagccggtatgttacaatctggcaaactattcagagaggtaattagtcagaaggtagaaagagagtgatatccggatgtccgtttagtgagcatccggatatttttttataggttaataatctaaaaaaataatatcgcatttgtcaagtgtacttcaagtctgcaaaaagatttgtttttttgttgtttgccaaatggtataatatataaaattattagtgatgcaaatgatgaacaaaaatggatttagccgatgtgcggaattctacatcggtcgtttgcggaaggagggacggtattctacggcgcatgtctacaagaatgccctcttttctttcagcaaattttgtggcacgtctaatgtgtcgttcagacagatcacccgcgagcgtttacgacgttacggtcagtatctttatgagtgtggcttgaagcccaatacgatttctacgtacatgcgtatgcttcgtagtatttataaccgtggagtggaagcgggcagtgcgccatacgttccgcgactgtttcatgatgtctatacaggtgtggatgtccgccagaaaaaggctttgcctgctacggaattgtataagcttctgtatgaggatcccaaatcggaacgtttacgccgtacgcaagctattgccgccctgatgttccagttttgcggaatgtcattcgctgatttagcccatctggagaaatcggcactcgatcagaatgtgttgcgatacaatcgtatcaaaactaaaactccaatgagcgtggaagtgctgaatacggcaaaggaaatgattaaccagctccgtagcaaagaagattctcatcctgactgtccggattatctgtttgatattcttcgtggggataaaaaacggacggatgaaagaggttaccgggaatatcagtccgctctccgtcgatttaataattctctgaaggacctggcaagaaccttgcatttgcaatctcctgtcacttcctatacgcttcgtcattcttgggcaacgactgcgaagtatcggggagtttccattgaaatgattagtgaatcattggggcacaaatctataaaaacgacacaaatctacttgaaaggctttgagctaaaagaacgtacggaggtgaataaagggaatttatcttacgtaagaaattgctgtacaggcagtgtgaaaatagtaaagtgctaataatcagaattaaaatatgtgtgttacttcttaggtaacggaattaaatttgacgcaaagatagacaaaaacacgaatagaaagcaaatattcctccactttttttagttttatctgaaacatagagcaaaaaactatccgaacatgaaataaccttatttccatgctctatactttttattgcctaatctctagattttccccgttgagtattaggcctttccacattctacgcctttgtcatgtgcgtgatttctattttcatcataatgtacgtttcgtgtatgtgttatccgttacctaagaagtaacggaatcacatggggtaaaaaaatatgattttaacgaaaccaaaatcagtaaatgccgggcctattagtgggacaggggaaggcgtagcacactcaaaacgctggtatgtagcactcgttcgaatgcatcatgagaagaaagttgccgagcgtttgtctaagatgggaattgattcttttgttcccgttcagcaacagatccatcaatggagcgaccgtcgaaagatggttgatacagtattgcttccaatgatggtttttgttcatgtcaatccaaaagagcgtatggaagtcctaagcttttccacggtcagccgttatatggtcatgcgtggtgaaagtactcctgccgttattcctgacgagcagatggcccgtttccgtttcatgctcgattattccgaagaagcagtctgtatgaatgatactccactggcgcgtggtgagaaagttcgtgtcataaaaggtcctttgagcggccttgttggcgaactcgtgactgttgggggtaagagtaagattgccgttcgtttaaatatgcttggctgtgcctgtgtagatatgccaatcggttatgtagaacctacaaagattagtaatgacgacacaaaaaaactttaacgtatttctattcattctgttgctggg

SEQ ID NO: 8442 - DNA, 550 bp, Unknown
  gut microbiota DNA sequence
cgagaagaaggtatccgagcgtttgtctaagatgggaattgattcttttgttcccgttcagcaacagatccatcaatggagcgaccgtcgaaagatggttgatacagtcttgcttcccatgatggtttttgttcatgtcaatccaaaagagcgtatggaagtcctaagcttctccacggtcagccgttatatggtgatgcgtggtgaaagcactcctgccgttattcctgacgagcaaatggcgcgtttccgtttcatgctcgattattccgatgaaacagtctgtatgaatgatactccactggcgcgtggtgagaaagttcgtgtgataaaaggtcctttgagcggccttgtcggcgaactcgtgactgttggggggaagagtaagattgccgttcgtctaaatatgcttggctgtgcctgtgtagatatgccaatcggttatgtagaacccacaaagattagtaatgacgacacaaaaaaactttaacgtatttctattcattctactgttaggagttttttctcctttgatggctcaaaatatgag

SEQ ID NO: 8443 - DNA, 1730 bp, Unknown
  gut microbiota DNA sequence
taagggcgtgaccaaggaacaggctatgcgtgtgaagcagctttatgagcagcagaacaatgtaaatgcttccaacgctaccggtacggatgtcaatgaatcacgccttcgtgaagaaatgaaggagaacacctccgatatgctggaagaccatccgagtactcaagacctcgcacgtggtaatcaggttttcggacgtaacatttttaatacccgtaacttgacttttgaacccagtgtcaacatcgccacccctttaaattaccgtctcggtcccggtgatgaagtgattatcgacatttggggagccagccagaacactatccgccaacagatttctcctgatggcacgatcaacattcagaaaataggtcccgtcaacctgaacggcctgactattgctgaagccaatgactatctcaagaaaacattaaacaagatatataatggtcttaataatacgaatgaccccacttctgacatccgtctgactctgggtagcatccgtactattcaaatcaatgtgatgggtgaagtagtccagccgggcacttactctctttcttccttttctactgtattccatgcactttaccgtgcaggtggagtcagcgacataggtagccttcgcaatgtccagctggtacgtaacggtaagaacatcgccacgatcgacgtctaccaatttatcatgaaaggcaacattcaggatgacattcgtctgcaggaaggtgatgtcgtgattgttcccgcctatgacgtattggttaagattgacggaaaagtgaaacgccccatgcgtttcgaaatgaagaaggatgaaaacttatctacgcttatcagttatgctggtggctttgaggccgacgcctacacccgttccttgcgtgtcgtgcgtcagaacggacaggaatatgaagtaaatacggtcaaagaccttgattatagtgtttataaaatgcgaaacggtgatgttgtgactgccgaggctatccttaaccgcttcactaataagcttgaaatccgtggtgccgtttaccgtcccggtatctaccagctaaacggtaaactgaataccgtccgcgaattggtgaacgaagcccaaggcttgacgggtgatgctttcttgaaccgtgctgtcctttatcgtcaacgtgaggatcttactactgaagttatccctgttgacattaaagccatcatggatggtacttcccaaaatatcatcctggcgaaaaacgacattctttatattcccagtattcatgatttggaagataggggagatgttgtaatccacggcgaagtagccaaacctgattcctatccttatgctgataatatgactcttgaagacttgatcattcaggccggaggcttgcgtgaagccgcttctgttgttcgtgtggatgtatcgcgcagaatcaggaatccccatagtacagcggataatgatactatcggtcgaacgtatacattctccctgaaagaaggttttgttgttgacggtacaccgggttttgttcttcaaccttatgatgaggtctatgtacgtcgtagtccgggttatcaggctcagcagaatgtagttgttgaaggtgaaatcctgttcggaggctcatacgccatgaccagccgtgaagaacgtctttcagatttgatcaataaagcgggaggtgctacgaattatgcttacctacgcggtgccaagttgactcgtgtcgctactg

SEQ ID NO: 8444 - DNA, 1517 bp, Unknown
  gut microbiota DNA sequence
tatctcttttcaagtatgcagccatctatagtttataccaacgatcctcacagacagttggtatatttcacatatagatacatatcagtttttacaccgatacgagggtcaagttaaaaatataccgctgtacgatttctaacctgcaaaatgtagggatttcatgagtttatcatgaatctagggacctacatatttcttcatttcaacatttattttataccatcccaatgcattactaccacccactctttcggttggtaagttccgtgaaaacggtgcggaatcgtagcaaccaccaaatcacaattggaagctaatacggttcttaattccttcagcaacatatccattcgaacaattaaatgaagatacttcatcatacaccgtatcacccgtacatactgataaatgcacatatcctctccccgtcttatctcactcagtgtattgggagaaatagcaaattcgctggaaaagaaactgttactgaaaatacgatccgttcccattaaagccaataccaaattgcttaaaaactcgtatggtttctgtttttcttttgccatgtcattctatgattaataatttataatatttcagtttttattactttatcaaatattgtccacatagggaaacaattagcgatccactgctaaaatcaactgtcactgacactattcacaaaaaaacatattacgtgagcttcctgcattttttcgagcacacaaattttcgtccctaaaaaagcaacgagagtttatctactggatacaagcaagttataaatctcacacacctcttctttcccccaccaacgtgccctcctttcaaaaggacaaaaggacataaggacaaaaatcccctatggtactataaaaattccaatgccaacgacgaagcctattagttgggagaggaattccagaaaggagctcctttattttccccgaatttgtacaataatatcaccatattgtcgaatgattgtattattgaaggcggaagcaaacgcgaacaagatatcgctcttctttccaagcacggccctttcactaaataatcctgacaatataggtaattttgttcaagagttgcccaatcatttcatgacagacaaaacgattcaggttggcgcaaaacatgatttcaatattcgtaaggttacacgtctataaaagcacttaacataataaagatcagcaatatacttcatagttcttatagtaagatgaataaaaacaatcatatatgtcctttttgtccttttgtccttttggagaactggaaaaacatcgggagatttgaaaaaaacatctcaataattaaaatcaaacattgggatatttcgatacaaatctcccaatgttttttctttatatttgtgtgtctaaatacatcactatacgtaaaattaggaaatatcaacgatcttcacagacagttgatatagtgggaaattcacatcggctttaacctccgatgtcagggcgtagattagaaatgcgccgtcg

SEQ ID NO: 8445 - DNA, 1837 bp, Unknown
  gut microbiota DNA sequence
gaacgcaagcgcagcgttttgcgttgcttgacttgctgacgattctcaaacatcagtatccggaagcacaaatcatggggcattatcaacttagtgcttcgattcataaagcttgtccctgttttgacagtcgcaaggagtatatggatatataaaaagaactacgggagctggcgaaagtgcagtctcccgtagttcttttttatgtttatatcatttagagattcaattattacagcatttatagctctcccggctttcctaaataataggtaataagccgtacctctctcacagaaaatgcctttgtcttcggatgaaagtcggtagacagtatctcattcatcaatggcttgcatctcctcatccagcgccggagtttattaaccgaagcacgaatcgtcaaatcaggaaaatacatctgcgccaactcttgtttattataacatttcactacaaattctgaatgttccatcgtttctttattactgttttatatgctataaagttacaaaaattagaacatataaacaaagaaagaagaggctattatccggtataatggaaataaaaagaaatatcaacgatcttcacagacagttgatatagtgggaaattcacatcggctttaacctccgatgtcagggcgtagattagaaatgcgccgtcgcgctatttctaatccacaatgtaggagaatcatgctgtaaacagcatgaagctagggacctacatttttttcatctcacatacgaaacactcacgtgtttattacatctcaacatttattttatatacccaaattgtttcagaaaaatcatctcaaatacttattatcgttatctctataccaatccttaatagcttcttcaaatgtataatgaaacttataccccgaatcagccaatttctttccgcatatattagtagaaatcattaacttcttcacacgagcaggacaaatacctaaagcttttccccctaacgaaccgacaatccttgcaactgtcattagaagacttcccggcacctcgacaacagtacgttgtactcccgtagcctttttcatcgtttctactatttgctcgatagtaaaagctggttcatatgtacagttatataactctactccttcattatgattctctaaacgataaagcataaagcgaaccaattctttcacataaatgcaagctttaatcgtatctttacggcccggatagaagaacttaccgccacggataccccaatacaaacgagtaaagttaccattttcccctttaccgaataccacacccggacgaacaatagtaagttgtcgttcgttcgacttttttgcctgccaaatcgtatgtattttttcagccactaacttagaaattccataaggcgtgttcggtgtgggaagcgtctcttctgttttcaaatcttcagctgcaccataaggagctatggaactggtaaaaacgattttctttatcccgaacttctcggcaaaagcgcatacattctctgcaccacgaatattcgtctcaaaataagcctgatccggatgtcccggagtacgatgaacggctgcaaagttaaagacgacatcttcatctgtaacattgacgaattccaattcaatagacttacgtacatcgcaataaatatattgtgaagtcacttcctctccttcttttaatacagcattataaccttttatagtaaacatctgagttacaggttctactatatccagattatatatcatagattcaggatgtatttcttttagtaatttcgtgagatgagtgccaacaaacccagcccccccaaaaataaaataattcat

SEQ ID NO: 8446 - DNA, 487 bp, Unknown
  gut microbiota DNA sequence
ggccatgtatgagctcgaccacggcgaacgttactggttcgaccagtccgaagagcagattatgaccagaagcaaccgtgaatttgaacaagtttcactcgaagaacagttgttttaccgttatttccgcccggccaaagagaaagaggatggcgaatggctttcaccggcggagattttggaagatataaagaaaagcagtgccataccgttgtcaaacaagcgggtaagtgtgttcgggcgagttctccgtaaacatgaaatcccgtcgaaacgtgtacacagaggtactgtctaccatgttgtacgagttttataagaccaacagatgcgttgcagatactacatctgcaacgtatctgcaacaggtatctacaacgccgtaatacgcttattttcaataagataattcaacttcgttgcaggtggcagataaaacagcactttacaaacttatgtgtaggtaaagctatctttctgttaaatt

SEQ ID NO: 8447 - DNA, 1713 bp, Unknown
  gut microbiota DNA sequence
tgcgggtgcaaaggtagaacatttttttataactccaaaagaattcaaacatttttcttatctttgtgccattatcaacaatatataatcatacattatggctgctgacgataaaaaaattatcttctcaatggtaggagtgagcaaagcattcactcctaataagaatgtgctgaaagacatttacctgtcgtttttctatggagcgaaaatcggtattatcggtttgaacggttctggtaaatcaacgttattgaagatcatcgccggtttggagaaatcctttcagggagaagtggtgttttctccgggatattccgtggggtatttggcacaggaaccttatttagacaacacaaagacagtaaaagaagtagtgatggaaggtgtgcaacccattgttgacgcactgacagaatacgaagagatcaatcagaaatttggtttaccggagtattatgaggatcaggataagatggatgctctttttgctcgccagggtgaattgcaagatatcattgatgcaactgatgcatggaatctggatagcaagttggagcgtgcgatggatgctctccgttgtccgcctgaagatcagccggtagaaaatctctccggaggtgaacgtcgccgggtagctctttgccgtttgttgctgcagaaaccggatgtgcttttgctggacgaacctaccaaccacttggatgcagagtctatcgattggttggaacaacatctacaacaatatgaaggtacggttattgctgtgacgcacgaccgttacttcctcgatcacgttgccggatggattcttgaactggatcgtggtgaaggtatcccctggaaaggtaactactcttcctggttggaacaaaagaccaaacgtatggaaatggaagaaaagaccgccagcaaacgtcgtaaaacactggaacgtgagttggaatgggtacgcatggctccgaaagcccgtcaggcgaaaggtaaggcacgtcttaactcttatgacaaattgctgaatgaggacgtgaaggagaaagaagagaaacttgaaatctttattccgaatggtccccgtctgggtaataaggtcattgaagccaaacatgtggctaaagcatacggtgataaattgttgtttgacgatttgaactttatgcttcctcctaatggtattgtcggtgtgattggtcctaatggtgcgggaaagacgacattgttccgcctgattatgggattggaaacagtggataaaggagaatttgaagtaggagagactgtaaaggtggcgtatgtagaccagcaacacagagatattgatccgaataagagcgtatatcaggtaatttccggtggtaatgagttgatccgcatgggtggacgtgacgtgaatgcgcgtgcatacctttcccgtttcaatttctccggaggcgatcaggaaaaactctgcggtgtattgtccggtggtgaaagaaaccgtttacacttggcgatggctttgaaagaagaaggtaatgtactgttgctcgatgagcctaccaatgatatcgacgtaaacactctgcgtgctttggaagaaggtttggaagatttcgccggctgtgcagtagttatctcgcacgaccgttggttcctcgaccgtatctgtacacatatccttgcttttgaaggagactccaatgtattctacttcgaaggttcatattcagaata

SEQ ID NO: 8448 - DNA, 682 bp, Unknown
  gut microbiota DNA sequence
ataattctgacgcgccttgatatattgcaattccgcttctttcaaccgggtggaaatcattaataagtccgtgcgactaatcatcccgtcgttgaaacgatcctgaatgatgtcatactgttgcttcacaatactttgatacttatccgccgcctgcaacatagcctgtgaagcggaagcattccaataaaccgcatcgctctgataatgaatctggtcgatggtaagctcctcatttagttgattcagcttttcatccgctttggcaatcttgtgctgggcgttgagtgccccgcccgtgtacaacggttgcgagacgataaatacaccttgataggtgtggttgcggtattcgcctaccggttcgttccaggcattaaggtcgctcatgttgagagtcccgtccgcattgacatcaatttttggcaagaatcccgtgtgagcaatcttccgtgcttccgtacttgccatcgtctttagtttctgttgcttcagaatttgactgtaagcttccactttatcccggtaagcttcccggctaagatagggctgctgtgccccggctgtgaggccgaggagcagcagagacagagttataagttgagttttcattttattcaatctaaacaataaattcaagtttcatataagagaaggcaattagcctttgattctttgaatg

SEQ ID NO: 8449 - DNA, 1559 bp, Unknown
  gut microbiota DNA sequence
atcttaatacgcattcttctcccccacaatcacattcgccacagtcttataaatgatatataagtcaagcagcattgtccaatgctccatataccaaatatcagccttcacacgttcctccatctgcgaaagctccttcgtttcaccacggaaaccatgcgtttgagcccaaccggtcaccccaggttttataaaatgccgcaccatatatttatcaatcaaacgggcataagtctccgtatgggccaacatatgtggacgtggtcccactattgacatatcacccttaaagacattgataaactggggaagttcgtcaatattagaacgacgaagaaaatctccaaatcttgttttacggggatcatcaaccgtagcctgtttactgtcagcttcatcattcactttcatagaacggaatttataacacacaaaatctacaccattcaaacctgtacgcatttgcttaaagaatacaggaccgggagaagtcagctttatgatacttcccactatgagataaacaaagggaaaaactgtaaccagaaaaagaccggagaaaataatatcgaatagccgttttaaaatacggttctccatcttacctaaaggctcataacgcagattcaatataggcatattgccaaccatactgtgccagatacgacgaggaaagcccttacaaacattaggaacaccgtgaaaataaagcaaatggttttcacaatgattcatgatagaaaaattataacgcccttcctccatcgacagagaacaaaaaacatgcttgatacccgggtgtgcggacataaaatctgagaaaccgtcaggattacccaaataggaacattgcgaagaaagggcttcgttcggtttaatatcaaaataacccacgacctcatatagagaagacgccagagaactttccatctcctcatacaacacctgcatattattgcctccacctataaaaacagcataacgcctatgcttacccttagcacaatagactatcagaaaatgacggataataatgcgataaatacttaagatgacaaagaggaaagagaaataagcgacaaagaaaagaggagaatagatagagattccactaaaagtcatgatacatgcccaaaagatggaaaaagctataatattcttcaacacgcgcaacactagttggtcggggcgaattccccgactatcccaaactctcccacgagagcccgaacaggccagataacagagacttaacgaagtcatcatccaggaaactctacaagagaaaggtaaagaaacaaaagcttcctcccaaaagaaaaggagaaaggacaataccagattcagaatgatcaggtctcccagaactactataaattctataaatttattgatttgactggtggttgataccatatcacattaaagattgattttaggcacatacttctttgaacttgctcaaaaggtctttcccgaacaaattccaagagattacaatacaaactgataggaaaacaaaaactaaaacatataccttcctactggttcccgaagga

SEQ ID NO: 8450 - DNA, 337 bp, Unknown
  gut microbiota DNA sequence
tgcaggttctaccacagcaaaaacaggtttttcttcctgaactttagctctggcaacctgaagctgactggcaacctgactgtatacctggtaagccagactcatgtcattctgcaaacgttcctgttcggtacgaacactctgcaaaatgatattgtcatgggagtccatatagtcggcgtatttcttctgagcgacataatattcttgttgacgttctttaaacaatttctccagatagagacaatcctctttagatttggaagtacgataatctatgatgtattcctgcaatttcttaaccacggaatcggctacgactgcagcaattttagaa

SEQ ID NO: 8451 - DNA, 989 bp, Unknown
  gut microbiota DNA sequence
ataataacctttatttgatgactaatttaggtattctgagcatttttactttctgtatcattattataatccatacagatataacaaagggagcggttaaggtaataatacccaaactcattcatagaatttgtaatacggtgaacagtaagacagagcatcctgtccataagccacttttccaggtcgtcccttctaaagctatggcacataatacaccattatagctcattaatccggcatttaagtttatagcatccacttcaagtgaaatggctagggggctaggaagaagcgctcccaagatagtatagagacttgcctttcgagaattaatcaaaatgcctataaggaaaaataatctggctagaactgtatttccctgaaacatgacttgccctaaacctaaacagaaggcttggaaataagtaatattctgtgtagtatcaataaccgtatcggaaactaatagtaaatctggtataagctagctgcaaactcccaacattccccatacagcaagaatgaaaggaactgtaaagccagaaattaaacgttgctgacagaaaaaataggcaatccatgtggaaagggccgaagcgataatcaacatgattaaaccttctaccgataattgtagaaatacgccaactgttatacctgctaaagttccattaaatctgtataatccatttttaatatcatcatacttatatcccgaaaaataggctgtcagtatacttattatattaccgcagactgctagtgttcccatttgccatgagtttagaaatattccaattagcattaataatcccgagaaagcattattctgaaacatcacttctcctattccacgttccagaatgagcaataaattgtgtataaaggccattcgtgtaaattattaactaataaaatgatgacaaaagtataatcttcagttgagaatatcaagattaagaaatgtgtaataaaggattgtgata

SEQ ID NO: 8452 - DNA, 676 bp, Unknown
  gut microbiota DNA sequence
agcaggctcacaaagttgtcggggttggtaatattgacggcaggaaaaccttttttcagttctccggtgacatagccttcgctcaccaatgtttgtatgatggaggcatcatgagcaaactctttgtccttccggatgagcatacgcaatttttcgtaatcgatacggatattgtcttctaccatatcccggggggctttgcctcgttgaatataattcttgacgaagtagagcaccatatttgagttgtacatggtggtttcgccataacattcttccgcaaagcagtagttgtcataccagggtttcattatttctatcaattcgtccacactgtggttgaatggactggtggtagaatagtaagtgagcatttggcgcacttcttcttccgtgaaacctatcatctcgttgaattccggcgtgagcgagtagttggttccgatgttgaaaccgcttgtgaggtcgtccattgtcacggggcttacaccggtaatgaaacaacgctcgatactggaataagttccagctttaattttattgaagaaggcgcgcagataaccttcgccatgtgtttcgtccgtatagcggtgcaggctttctatatccgagaggatggcattggtgaaatggtcgtattcgtcaataaaaaggtaaatacgttggttggtcttat

SEQ ID NO: 8453 - DNA, 1067 bp, Unknown
  gut microbiota DNA sequence
attgaaggtcgttctgatgtagaaaagctcactagtatacctattgtcggtgatatcccattaactgatgaaaagcagggagctattgccgtatttgagaatcaaaacaacctgatgagcgaaaccttccgtaatattcgaacgaatcttcaatttatgcttgaaaatgataagaaagtgattttagttacttctacagttagtggtgaaggtaaatctttcatttcagctaatcttgctatcagcctttctttattaggcaaaaaggttattattgtcggtttggatattcgtaaaccgggtttgaataaggtatttaatattccaagaaaagaagtgggtataactcaatacttggccaatccggaaaagaatttgatggatttggtgcagctctctgatgttagcaagaatttgtatattcttcctggtggaacagttcctcctaacccgactgaattgttggcacgtgatggattagataaagcaattgaaacattcaagaaaagttttgattatgtaattctggatacagctcctgttggtatggtaactgatacattgctgatagggcgtgtggctgatttatctgtttatgtttgtcgtgcagattatactcacaagaatgagtatactttgatcaatgaacttgctgaaaataataaattacctaagctgtgtactgtaattaatggtttggatttgaagagaagaaagtacggttattattacggttatggcaaatatggcaagtattacggttatggtaaacgatacggttacggttatggatatggagaacaaactcacgacaaggaatagtaaatccaactaatataaaggtaaataaacttcgatgctggatgcatagatgagatccattgatgacctctattttaagttaataatgtcatagagtacttttaatactttacacaaaagtgagatggaatatgtaggtccctaacttcatgctacacacatgaagaaccctacattttgtggtcaggaaatatacagcggtgtattcctgatcaacgccctcatgtcggtgtaaatccgatgtg

SEQ ID NO: 8454 - DNA, 342 bp, Unknown
  gut microbiota DNA sequence
tgttagaataggctgaaacagtgcattactgtacggaaataaactaatttcagttcaaattcaaacaaagagacaacgaataataggcaataactactaactatctgtcattctctgcttattctgctgggcaaactctgtaggagtgactccaaattgtttctgaaatactttggcgaagtaagaaggtgactgaaatcctaccctgtcacaaatctcattgatgcgcagttctccctcctgcaacaattccgcagcatgttttagccggatgatacggataaaatcgagtgaagaaaggtcggtcaatgccttaattttacggtgaaggctggagcggga

SEQ ID NO: 8455 - DNA, 789 bp, Unknown
  gut microbiota DNA sequence
taagtccaatccctgttgtgagccatgggtaatcagaatattatctttatcgaaagccgtgcccaaacgttcgttcatccggttggcaatccattcgcgcaaaggggcataaccttctgttgtagtatattggagcgctttcgtacctgcctctttcaatacgatctgattgatctcattgatttcatctatcggaaaaagttccggagcaggcagaccacctgcaaacgaaatcacatcttcctgttcggtaacttttaatatttctcttatttccgaagcctttatataagacattcttttagcaaaattcaacttcataacctttaagtatattaggagattaaaacaacactgcaaagtaaatcaaaaaagaaagacgagaacagatacacttttttatatattgacaggtacagatgactgacttttcaaaggataagtatatgaagttaatctccccgattgcttatttcgtcatgagtaatcagggtattcgtcgaataatcctatacggaaccttgttaaatgaaatgtagatatggaggactgggaaaaagtattaagaatagaatgtcagggcatcaccccgactgaaatctcaaaggcattacgtgccatcaacatttatgcacaggagctggaatgaaacagagagaaagctagtaatgagctaataacgaggcaggtcttttacttcctcataatatttttccactccaacctcttgcatccgtttgttgatggctacaaatctcttgtataaatgctcatcaaagcctgtattct

SEQ ID NO: 8456 - DNA, 717 bp, Unknown
  gut microbiota DNA sequence
gtattatcaaatatacgagattttaccatttacacctttattttatgacgtaaaaatacgatttgtttcggatatgacaaaaactgtatggaattagataatctatttcaaagtaaaaaacaagacctttgcatatccttctcaatacatgagaaaggaatcaatagaaagaggttaaaaagacatggaaatgaaagagatttttaagaggtatttagtgtttgttatcggactctattttttagcggcaggtatcgtgttgattatacgctcggcattgggaactactcccatatcgagcatcaattatgtattaagcctgaatagtcctttatcgttgggtacttgcacatttatcatcaacatggtacttatcctgggacagttctggttaatccgaaagaatagaacccgacaggatattattgaaattcttcttcaactaccgttctcttttatcttttcggcattcattgatttcaatatgatgctgacaagcgaactgcatcccgctaattatggtatgtcgattgctttattacttacaggatgcatggtgcagtctatcggagtagtgcttgaactgaaaccaaaagtagccatgatgagcgcagaagcatttgtgaaatatgcatcccgccattataacaaggaatttggaaagttcaaagtttattttgatattactttggttacattagccgtgattctctcgct

SEQ ID NO: 8457 - DNA, 614 bp, Unknown
  gut microbiota DNA sequence
taccgttgtagtttttcatctgtttctgaccgtttacttttcgaaattcggcagcaggaattatcttgggcagtttatcggcaaacatacaccgttcatcggaaagggtatatcgcagatgttctctgaatgtagaaacaggacgggattttatttctgtctttatcttatttaccagtatatcaagatccattacgctgagcgctatcgtatcttcgttcttacgaaattgagtaattttcattaatttgataataatttgttttgtcagcgtctttgtgatcgttgagactgctaaattagtcataatatccgaaaccggcaaagaaaacaagtttttaatacagaaaattattgatatatcaagcatctctttaaccgaaagaaacgggattgccaccactctattacggggcaaattagttttctctgcttgaaactatagttccagctaagagaaactatagtttcatcggtaagaaaccaatggtttcaagtaattggaactagagtttcaagcctatgaaactaaagtttcaaaccgcagaaccaacagtttcacgccttgaaactgttagacacaactcataagtacgaggataataaattgaact

SEQ ID NO: 8458 - DNA, 1947 bp, Unknown
  gut microbiota DNA sequence
agtgctgtcacactattaaatacttatactctgcaaattagattataatccgtgacagatgacagatatattttattttttatttcatagagatgctgatatgactaatttaatactttatatatccttcttgttcatacgctttcccatatttatgaatcattgccaccaatggccttaaacgttcgtcagaaaccaacatagccctataacgcaaatactgattatcataaagctgccggtttccgtccttgaggcgtttcttcacatccgtaggaatgaaaaattccgcacggttgcccaatttgacatagaattcatttaaaaagatagaaatgccagccaaatctatgtctccgaaatgaatatagcgattgggaattatctttagccagttacacaaatccttcgattgcggataacgggacacgaaaagaactttcattccttcaaacaagtacttttgggcacggatatgctggaaattttctccattctctatacccactactacaacatcttcaggaatacggaaatattcgtaatcctgcatgaaaatagaagtgccttgcaagggagaaagcacacatggttcgccatgaaaagtagcttctataggcgtataacaattgaggagaaaacctttgaacgtacgggtatatctcaatttagagtcccccgccttcgccacttgctccgaacgtgacacttcatccggacagttcttcatctcaatccaatcttccagctccatgccggaagtataattctgggagatgtagatacggcatccttccgggtcaatcatacgaaaactacgcttactccctcggggaacaatagtgatgattccctcatccattaatctatttgctatcagtccatcaaactttgtgtaaggtatgagctcgccgcccagcattttcataactagcctcgccattgccaatgtaaataaactgccactcatttttctatcttattataggttaacaatgggacaacctgtgtatttgaccgcccgtctttactcaataaataggtataacgataatcttccacattgtaagtagtgggagaactgtttaccaacaatatattccggcaattggcaaagtctagaatacctttcacattgttggggtgtaacttgcctatttcatccatcatacaatggattttaaagtcaccaaacttacgtgacgccttttctttgaatacattaatcagcatgatattgaccatggctttcaccagaatgtccgtaccgtcggaacctacattggcaatcttctccacccatcccgtgtcattatcattctctttcacgcggaactccagtttgaatgtatcggcaagcgccaaccgcctgcgtcccggatcgtcgagcaggaatttcataaacgacaacaaatgccggacagccaccgcattgacatcttcacgggaatcctgcgagaacaagtcaacctttcccatattatattggttctcatcgctaaaccgtttaatctccaacaatagctgcattagtttatcgctgctctgaagcgggcgaagagctatttcctttattactccggcaaaattccgcttgacaaaatcgtcgttgatatcctttattgttctgtgtatctcgctttcattacgggtcagtcctcccacttcctgcgaaatccggcggattatatccgtataccgttcactgatatgtttctgataatcggaaatcttatcattatccacaaactcgcacagattggaagcgaaatcatagtaatcctgttctccaaccagttccgtacggaaatgaaacgtgttttttgacgagaagtttccattgaactgcgtcaccgctttcttgaattcttctgtttttctgatagtggatacgatgagcgacttcaactcttccacaataacatcgcaatttttccgagtaggctt

SEQ ID NO: 8459 - DNA, 10347 bp, Unknown
  gut microbiota DNA sequence
tcgctcggcttccatcagatgttgttcttccaaaatactatgtatttgcttcgaatacttcttctccaaagaagaaacagcttccccctcttcttccgtcagtcgggtgagacggtcggtacagagttgccgggctgcttgttgcctatcgcgctcctgcttcatttcctcgggagtgcggacagaacgctcgattgctgtcagattgagtgaaacgccgaacaaagtagcttccttattcactaattgaggttgcagttcattgttgtacaacaccagttcctcatccgccaccttgcctatcgtctcctgccaatccggtttgttcttctccagccattcacacaaagaaccttttcgtttctcaatcaaggcgtccaatgtttgcaactgttcttcaatcgcgctccgttctttacgaacggtctccatctttgtctgaaattcccatttcaattctttcactttccattcacactcctgtctcaactgctttatttctccttgctgctgacggatgccaagttccagttccttgtcctttttgcgcagttcgttaatcccatcttcacaatcggacatttccttttgatggggatgttcgtatttcaccttttgaagtttcaggttacactgtgcctgttcgtcgcgcaactgccggatacgattatccacagtctgcactttctcttcttgcgttacccttactttttcttcttccacacgaagctgttgcatcaattcctcctgcttgccggcaatctccgcattccgagcatttatccgtgcttgctggctattctcaaaagtacggaaatcagcttccagtttctcaaacaacaatcggtacttgctcaatacatcctcataagcccttgtcagttccgatttcatattccggacttgttcaagttcctgaatcagtaattcttcgcaagatacccgtttgatgatttcttcaatccgcatctgctcgtaatgcagacgtttctcacgtatctttttgagcaaatcgtttattatacctatatccctaattaagccatcacgctcattggtgtacttttgttgcagttcacccataagccgcagcaaccgttcacgttccgtctccgctttagcctgttcttccttcactaacggaatctcatgcaaagcctgtttctccgcaaagttaagctccgcacgcccttcaccaatctgcttttgagtataaatcaagtcacgataggcgttcattactttctccgccatcttccggacaggcacttctccattcttgttctttgtaaaccaaagcatcacgtccctgtattcctgctcgaattcctttatctggctacgatagaagtccaaatcgacagagatatcctcatcactcatcgaacggataatggtatcttttataaagtcagcatccagtttggaatttaaaaagacgttctgtatcgtacggggaatattctgatattttgcactttccacaatggcaaacttgcggtaaggtatcatttcatgcttgcggttattaccgaaaataatgtcccgatacatttcatagctagtcacttgtgcagtaatctgaatcttcgaaccgatatgttcgcggatgcgtccccactcggaatgtaccacattgtgttcgtcaatgaaccagtcctgttggaatggcgcatcaataaaacggaaaaacacccgtccctgggatttggcagctaccacacaatacgctccattctcccgcatcacctcatagataatgtaagaattggcgtatggaaagtaaaaagcatcgaagcttttcttctccttcggaatgcctagtcttagtttgtcagcattataaaagaataggatggcacggagcagcgtactcttaccgacaccttgcgtacctataaaatgtacgttcccatccaacttcacttccgcatacggaatatgggcactgttcagaaaaataatcttattcaggtatctcatcttgcacctcctctgaaattgtgatacaatcaaccaagtcctccatataatggaaagccgacaatactttatacgtcccgtcaagttcgttttctttctctatcagtcctatactctccagttctttcagcagtttgccgactacttcatcatatttcttcttatccgaaaacagtttggttgccttttctttcagttcgatatcgcatcctatctgaatctcaatatcagcagcacgaaacagaaagcccgggccgaatgccgaatgataggttttcaggaaactcaagtaatcaatccacttctgaattgcttccagtttacgttccaaatcgactttcgattccttgcgagtaaagtagtaataaccgtcaccaccttccagataaaaaccgatgcctttatagtaatcataataatcgggcaaatcttcctcaatggcatcatacaagcgtttcacttgggcagagacactattggaagaaatgaatccccctttgctaagtatattaaatatctcttcagtatatttcatagtcatctgtttttagcattcagcatacatcatttggcatatattaaagggtattccacttcgtcggaaatttcataagtatccgtaaagcgaagttcgtcggcatactgtgacgccagttggcagaaaaagattaatttctctccacgtgtcacctctttccggtagcgatagttcatcacaaaagagaacagatgggtgctggacgccataaatgaattatgcacctcctgcaagtttacggtatctatcatttgcgactgcccatccaggtatccttccggaatggcatctgccagttgtttcattcctttcggagaatttctctgccgcgcgacaagtttcttcaaaatctgaaaagcctcatcggaagtccgtagattatcaatagaaagcttgatgcgataaccgacctgcggctccatccagacaggatttttttgtgcggcaacagaacggatacttgtatgttcttccaacaagaactggtctttcaagtacttcaacttctttactttctcaaagatacggttctgataatctatcagattcagataatggatgatttgtttctggatttcaatcagattatggtacgagtcatttagctgaagttttacgtcacttactacattccgcatttgtacgtccatcgccacccggaagaaaacaggctgtccgtagtctatcaattcctcacttttacgaatcagcagagcaatattattccgtttctcatcgaggcggacaagtttagtcttttttatcttataattaggttcgttcttataggtattatccatgtttcttttcagatccatcacattgcggactgtagtcagagcgatgtttttcaggcagcgtttcacttcacgctggtagttgtatttacgttgttcgttattctctttcaagtaatagtcaatgttttcattcagtcgtgtcaggtaatcctgcacgaaagatacattgatttcttcatttacttcgagtacatcttcaaagaatttcagataaatatcctccatttcaaggaagtcgccagtgtcccggatgactccatagtctatcagatagcggatacgctcttctttgtactccgtcatttcaagcgcataatcataacggaacgaaagagatttccgtttagcaaacatttctttcaagagctctttctcccggtcgagactcttgaccagttcttctatggaacgaaaagtactcatctaattcactgttcttccaaatccataatacgtctcgttgcaggatattcttccgcaatcgtccttttcttaattatttctgccacaacactttttatacttcttcccgcttccacagggacaaggatcgttccttccgaccgtgtgttcggaaggcatgccacgaaacagattgtctatccttgcctgcatttctggagtaatgtccataccggcagccttcatattcgggcctgcaacaatgcggggaggattctttctaaatttgtctttttgaaataaaacgaatgcctcctctgaagaataacctttcaagaaccaacggggacaatgattcacataatccataaatagttcaacggcctcttgcagttcctgcatggaagaaagtttgtggctaatcattgaagtaataatagacattgaattttcttccgtttgagcagtaaaccacaaatatgccaaactgctattcgctttttcctccgtatatcccagtttcttcatcatatactccttcaattcatcccaacatggattaggaatgatactcaatggcatcatgcccgctgaaaaggcttcctctttagaaaacttcttcctgtccggtatatcacggcgcagatacaattgctcctccaaagattcaaaatcatccaaaaaaggagactctatgtaaaggtttgtattataaccatcttccacttcaaaggttagtcgctgtatcaatgccgaattagccaaactgtcagctatttcttcttttgtcactgaatgctgcaaatagcctaccagtatatacaataagtccgaataagagagaaaaccatataaatttacgattccacaggcatactgttctatcataaaacgaacagattgcttttgggaagtcaacagtttattcagataaggagctactgcctcacgcaattcatcgcagatcatataacggactttactctcatccatgtgactacagtccgttgctatgaaagaaagagtttccaaagtagtcaccaaaaaagaatttgtacattctacgtaactaccagatcccgctttcactaacttatcaagtaatgccagttcataatgcgtcaaccgggaaagccacatttcaggacaggtcaaaacagcttctgcaaaataagttacatactcatccttgtgcaacttggtaggaacaggtaaaagcaaaattttcgccatcctctttaattcctcttttgtattcatcttcaagccatccaccaatttcaatgacggctgaaacaattccgactgacattttaacataatatctattcacttattgattaattcacaaaagtaggaatttcttatccgacatcactattttgggatgagaatttgcaaaggcaattactatttatacctttgtgacttcaatagagaatgtgatttcaatagagaattagtaacccgttaaaagaggaaattgattatgcgttcattcataatgcttctttgtttagtacccaccctcctgcttgcccaacaaagcaaacttgaaacacagttgaaacaggcaatcaaagataagaaagctgaaatagggattgccgttattattaatggaaaagatacggtaactgtcaataatgacattcactacccgttgatgagcgtattcaagtttcatcaggcgttggcattggccgattatatgggaaagaaaaaacaatcactggacacccggttgccaatcaaaaaatcagatttaaagccggatacttacagtccgctgcgagataaatatccgcaagggggaattgaaatgagtatcgccgacctgttaagatacacacttcagcagagcgataacaatgcctgcgatattcttttcaactatcaaggtggtccggaagctgtgaataggtatatccattcattaggagttcgggaatgtgccatcgttggaacagaaacggcgatgcacgaagacttgaatctgtgttatcaaaactggaccactccgttagctgctgccgaattattggagatattccacaagaaacctttgtttgcaaaagtgtacaaagactttatatatcagacaatggtggaatgtcaaaccgggcaagaccgtttggttgctccgttgcttgataaaaaagtaaccgtaggtcacaaaaccggaacgggagaccgtaatgcgaaaggacaacagattggttgtaatgacatcggtttcgttcttttacccgatggacgtacttatagcatagctgtcttcgtgaaggattctgaagaaaacagtcaggcgaacagtaagactatcgctgatatttcccgcatcgtttacgaatacataatacagcattaagaacgacacaaaacacgttcggtacgaatcaggattgaaacaaagtaaaaagtaataggaataaaaaaacatttatatgaaactgcatcatattgccatttggaccttccggctggaagaattaaaagaattttatgtccgtttcttcggaggaaaaagcaatgagaaatacattaatcccaagaaaggatttgagtcatactttgtttctttcggagagggaactgacttggaactcatgagccgtacagacgtacaaaacacacccattgaagaaaacagggtcggactaacacactttgctttcacctttcccagccaggaagaagtattacgtttcaccgaacagatgcgttcggaaggatataccatcgccggtgaaccgcgtacttcgggagacggatactttgaaagtgttgtgctcgatcctgatggaaatcggattgagtgtgtatatcgggaaataacaggaggaggaaaaggggaaggaaaaacagaaacagcaatcggaactgaaactgaagttggagcggaagctgaagctagaccaaacatcgaaacagaaagtattcattctgtaacgctcgatacagaacgcttgcttctccgcccttttgaagaaaaagatgcagaagcatttttcgcctgttgccaaaacccaaatttggggaacaatgccgggtggccgccccaccggacattggaagagtcccaccgtatactccattctacatttattaatcaggagggtatatgggcaatgatactaaaagaaacgcaacaactgatcggttccgtaggaatcatccccgatcccaaacgggaaaacccacaagtgagaatgttgggttattggctcgacgagacttattggggcaaaggatatatgactgaagcagtacaaggcgttctcaaatacggttttgaaaaattgaaactaagcctcatcactgccacttgttatccacataataaacgttcacagaaagtcctgaaaaagaacggtttcatctatgaaggaaccctccatcaggcagaactaacttacaacggaaatatctacgaccaccagtgttattatctccccggcatctcccaacctactccggaagattatgaagaaatcctccatgtatgggaaacgtccgtccgtcacacgcatgatttcctgacggaagaagatatccagttttacaaaccactgatgcaggaacattatctaccagtcgttgaactttttgttatccgcaatgccaacggaaagattgccgctttcatgggactaagcgacgaactgatcgaaatgttgtttgtacaccctgacgagcaaggaaaaggatacggcaaacgattaatagaatacgcaagagacaaaaaacagatggataaagtagatgtcaacgaacagaatgaaaaggcactccaattctatctccatttaggattccaaatcatcggtagagatgaaacggacagcatgggcaaacctttccccattcttcatttacaactgccggaagccaatcccggtaacagaaattaatctcaaacaaacatcagttgagtaagtgcccccaagcaattgttgagctaatttaatgataaaagaaaagaaacatgaacctacgtgccagattatccgaacgtgtacacattgaagatatcaaagaagtactccatttcatacaggacgacaagcgtcttagagaagaagtctaccagttgatattcgacgaagaccacattgtttcctatcaggcattgtgggtatgtacccatttctccaaagcagatgtagaatggttgagccaacgacaggacgagttgattgacgccgccatgacctgcccacattcgggaaagcggagaatgattctgaacctgatatgccagcaacctgccgccgacccgccacgagtggatttcctcgatttctgcatggaacacatgatatcccgtgaagaaccagccggtgtgcaatctctctgcatgaaactggcttatcaactgacgcgctccatcccggaactgcaacaggaattacgtaccatgctggaaatcatggaaccggacttactggttcctgccatccgctctgtacgaagaaacaccctaaaggctatgaaagcaaagaaaaattgattgtttttatcactttcatttcaataagtacaaatacgtatttagctgtcaaataagaatatacctatcaatcagagtatattcagatggaatatttgagatatacccgtcactgaaatctgaataccgatacagaaagtaaaaaaggctacgagcttattaatgatttgatttcccacaggtcccaatttctgaatgaacctctgtccttgtgaaaggaatacataaaagatagccgccatacagataatgacaagcgcaatgaccaaataattaattccggtttgcaatagtttgcctttgacactggcggacgccatcaaagtaaagatgaccgatatgctacccggtccgatactgataggaaacgtgatgggataaaaaatcttctgttcgatattcttccatctgaaaccatctacattctgactggcttctcctttatcagtagaacccgaatcacctaacaactccattgccgtcttacagatcagtattccgcctcccaactgaataacgggaatagccaaaccgaaaatcaatagaaacagatgccctatcaccaacgtccctacaccaatcattataaaattgaacgtcagtttctgaatagccgctttccgctgttgaggatcgagatctgtaaaaaatccattgacaacaaaaccgtttcccagaggatttatcaccggaaaaagcgccataaacgatgacgaaaatataatgagaagattacttaatgacataatacctgtttttttgatactttattaatatctgatacttatctaaaacataaatggaacgttattgttttgagaatatgtttttgcggaatgaattcgcatccgttggattccctgtaaaagcagcttataataaacctttaactagaaattaaaattatgtgtacaagagtcgtttattcgggaaagaatggaatggtggcaaccggccggtctatggattggaaaacagaaatgcacagtaatctttgggtgtttcccaaaggtatggagagaaatggagaaacgggaaccaactctttgaaatggacttccaagtatggcagtgtggtaacttcggctttcgagattgccagcacagacgggatgaatgagaaaggtttggttgccaatctattatggttgcccgaagcagaatatccgatcagggatcaaagcaaaccgggacttgccattactgcatgggtgcaatatatgctggataacttcgccactgtaggcgaggccgtggccgccattgatgaaaatacttttcaagtagtatcggatatgatgccggatggctcccgcctggcaaccctacacttatccatttctgatgcaacaggtgattgtgcgatattcgaatatatcggtggaaagctgactgtctaccacagcaaggaatacaaagtgatgaccaactccccaacctacaacaagcaactggcactgaacgagtattggaaatcaataggcggattgagtttcctgcccggaaccaaccgtccatccgaccgttttgcaagagccagtttttatattaatgccctgccccaaacagatgatgtgagaatagccatagcaagcgtattcagcgttatccgaaacacttctgttccttatggcatctctactcccgaatttccggagatttccaccacacaatggagaacggtatcggatagtaaagatctgctctatttcttcgaatcgagcctgactcccaatacgttctgggtaaatcttcgggaaatcgacttgtcagaaggggctccggtactcaaattatctatcgccaatggtgaaacttatcacggaaatgcaaccaaagactttaaaccggcacagccgttcagattcatgggagtaaaggggtaaacgggaatgtacataaacttatccttactgatagcccaaataaaaatcgttgtaggtattcacgagaagtcaacgtcagccccctgattggcgtggagaaaattaatacagaaaagactgatatataagagattgatgcagaaaaaaaatagtgacggtatccgcttgtgatagtgacggtatcgttgtcatataccgtcactatccttatcggataccgtcact

SEQ ID NO: 8460 - DNA, 1616 bp, Unknown
  gut microbiota DNA sequence
aattccttcaagtgcttttttcggttggtcttttatttcgatagcaaacttgatttccgcttttgccacaccacgcagattagtcagcgagtgcaaagtagtcaccagacggatgctctgtcctgacagtacagcctgaccgaatttcattttgtccataccgtagttaatcatcatttttaggttatttacctggataatctgattccacaaataaggaagcatagacaatgtcaggtagccgtgagcaatcgtgctatgataagggctgtctactttagcacgttccgtatctacatgaatccattgatgatccagcgttgcatcagcaaaaagattgatacgttcctgcgagagttccacataatcggaaacacctatctgttggcctactagtttttcgaattcttcgtacgaattgataattactttttccataagtcttatcgtttttatgggggttatttactattaaattggggacaaaaataggaaaaataaactgatatgccaccaaatttataaataaaagcaaggaatgaagtatttaggtatgttttacaaaccggaaacctgtttcagtgcttctgtcagaatactgtaccccttaccattcaaatgtaaatcgtcgagagtcaactccggattcagcctgccatcctgcaataaacgattgaatacgtccagatagacaatatctgttccctgcaatttttcgtgtatcttccggttaaggatctggataaatttattcacagccgtactgtaatcatcataatcattacgcggaaaaatacagaaaagatatgttttcagtgaagggacggcaagaaccgcttttacataacgctctacatattcatctatattttcatcgttcaactgataaatatcattggttccgaattgaacgacgacctggcaatcggaagtgtccaccgcaaaagactccacataggccagcccttcaccgggagcaccatagttcagacattcccattgtgggaaatagatatccagtgcccaaaaagccatgtgactgttgccaagaaaggcaaattttggtttttcttctatcctatccatacaatttcattcaaacgtccacgttatctcactcaaactctcaaacaaatatagaataaaattcgcagatttacgttacttttgcaaaggtaatcacattcattcatatatataaaccaatgatacattttttcaagaaacccgtttctcaccttgcgttgccggagaaattcacttatcctttccattatacacctcatccattgtgtgtgttggctgcggaagaagtgaaagaatatattgcaagccggaaagaatggcaagaggaattggcttccggaaagatgtttggagtgttgattgtgcaaacggacaacggaataacaaacaacgaagaaaatcagattggttatcttgcagctttctccggcaatctgggcggaaagaatctgcatccttatttcgttcctcctgtttatgacctattacaaccggagggattcttcaaaatcgaagaagaacagatttctgccattaatatccgtattcgtgaactggaaaacagtagttcttatctcgattcaaaagag

SEQ ID NO: 8461 - DNA, 486 bp, Unknown
  gut microbiota DNA sequence
gcttccagcaaattctctccacccacaaacggtacatcaaacaaagcataattattttctatctttttctttcccagactcttgttattcacaaacagctctacttcttccgcattagagaatacagggacggattgaatacattctttctgcgccgtattcaccactcccccacgacttttccactcccgattaccaatgacaagtatcggacgacgtgacaaggctgtcttatagaaccaataaacatctttcttctctctgtttaacccgacaacgcctttattgtttacatgaggaacagcatctacacgggattcggaataaaaatcattcagattccacagactagaaccggctataaacggacgtttcatcatttcattgaggtaatgtttatgatataccagtccatattcctgcgagaagtcaaaacgttccggctggtacgaatgaactctcggatctacccctggcccatattcc

SEQ ID NO: 8462 - DNA, 836 bp, Unknown
  gut microbiota DNA sequence
caagcaaacgctggaactcattgatatccggttcataccaaccttgatacaagttccatccctgaatcatcgggatttcggtgagatgagcatcttcgtagtattgaggcatattgtgataagccatcatcgtatatcttgaaggatcttcctcacgaatagtcgcctccaaggcacgggctactttttccgtgaaacggtagtaatcttccaactgtttgccttcggtatagggacgacgcaggaaaatctcattcatatacccccaaatcattacggaaggacggttgaaatcctgacgtaccatctctttcgccatctcaacggaattatgcaggaactcttcggtttctgtaacagcattaacgacgggaatttcaaccgaagtcacaatgcccagtttatcacacatttccatgattaccggatcttggggatagtgtgatacacgcaggtagtttcctcccatctccttcaatagcaatacatcctgtacgtgcaattcgtcacgcaaagcatttcctttctgaaaataatcctgatggcgggcagtcccgatcagtttgcgtcctttgccattcaggaaaaaacctttttccgaatcaaacttgaaccagcgcaaacctaacggattcaccacttcatccagcaaagtaccctttcttttatcaagaatacgggtatataccatatagcgataaggatcgtctatatcccatagacgaggggaatctatttttatctttttggagatgtccgtcttcgtctcgccggctgccagctttacttctgcctgcgtctttttcacttccttgccatccgcatcacagattata

SEQ ID NO: 8463 - DNA, 631 bp, Unknown
  gut microbiota DNA sequence
gggtacggatataaactcccgacgaagcataatcattcgttgcaatgtgcaccggattcataaactgcaaatagacgtcccggtagataccgccaaagaaagtaaaatcggcagataaggggggaatattcggattatagacattgtttacataaatggcaaacaggttttcctgtccataacgcaaatggggagtgatgtcaaaacagaagcgggtataccctcctttgtgctctccaacgaactgaccgttcaggtagaatcgtacttcctgattggctccttcaaaatagatcattgcccgacgtccctcctggcttttgtctataaacaactgttttcgataccagaccggcccccgatagaatcccggagtttcatcgtctgcatctttatcattccaggtatgaggtatattgaccgtctcccatgaagagtcgtcacagccagtcagttgtgcttcaaatggagatccttttgtaaatttccatccgtcgttaatggtgtataccacgcgttgctgtgcctgcgcccatcccacaataaacaatagaataaagatatagaataacttcttcataatctatgtatgcatctaattaaaactttatttttacctctctgcctgtgt

SEQ ID NO: 8464 - DNA, 32438 bp, Unknown
  gut microbiota DNA sequence
accggaagtgactgtgaggtaattcttgccctttacaaagataaaggcatccattttttggaagatatcagcggtatcttcgctttcgtgctttatgatgaggaaaaggatgaatttctaattgcccgtgatccgataggggttattcctttatatataggaaaagataaagagggaaaaatctacttcggcagcgagttgaaagctctcgaaggattttgtgacgaatatgaagtattcctccccggacattatttctatagtaaagagggaaaaatgaaacgttggtattcgcgcgactggacagaatatgaaaccgtcaaagagaatgatgcacaaaccgaggatgtgaaagtggcattggaagaggctgtgcaccgccagttaatgagtgacgtaccgtatggagtgttgctttcgggcgggttggatagttctgttatctctgctattgccaaaaaatatgcggcaaaacgtatagaaacagacggtgcaagcgatgcgtggtggcctcaactccactctttcgccatcggtctaaagggtgcccccgatttgattaaagcgcgtgaagtagccgaatatatcggtaccgttcatcatgagatcaactacaccgttcaggaggggctggacgccctgcgtgatgttatttatttcatcgagacgtatgatgtaactaccgtacgcgcttccactcccatgtatttattggcgcgtgtcattaaatcaatgggaatcaaaatggtgttgagcggtgaaggtgccgatgaagttttcggggggtatctgtatttccacaaggcccctactccacaggcatttcacgaagaaacagtacgtaaactttcaaagttgcacatgtacgattgcctccgtgccaataaaagtttgtcagcatggggagtagaaggacgcgtccctttccttgataaagaatttctcgacgtggcaatgaacctgaacccgaaagctaaaatgtgccccggaaaaaacatcgagaaacgaattgttcgcgaagcctttgccgatatgttaccggaaagtgtggcttggagacagaaagagcagttcagtgacggtgtaggatattcatggattgacacattgagagagatcacagcaaccgccgtgagcgatgagcaaatggaacatgctgccgaacgttttccgatcaatacgccacaaaacaaagaagagtactactatcgtagcattttcgaagagcatttccccagtgaaagtgcagcacgcaccgtccccagtgttccaagtgtagcctgctccacagcagaagcactggcatgggatatcgctttcagaaatctgaacgaacctagcggacgtgctgtgaaaggaatacatgaagaggcctatacctgattaataaaagagtgacaaactccttttgtgcaaactatcagacgtgtccggagaatgtttttatgacagacagtcttatttttgacactcttttgtagcatttctattctaaaatcccaaggattaacgcagattagcatattatcggctgatttgcgttatcttttttataattttgaggccaaacccaattaaatctatcaaacttttaaaagatcaaacaaatgaatttaaaaaaaatgatgatggcttctgcctttctaatggctgcttgctgcatgcaggcacagacaaaagtgatagctcaccgcggtttctggaaaactccgggatcatcgcagaacagtatttcatcacttctaaaagcagactccatcggttgttacggttcagaatttgacgtatggatcgcgaaggataataaattagtggttaaccatgatcctgtatataagatgaggccgatggaatattccaaaggtgatgcactgaccggactaaaattatccaacggagaaaacttacccagcctggaacagtatctggaaaccggaaaaaactgtaaaacccaattgattctcgaactgaaagcacatagcaacaagaaacgtgagactaaagcggtgcaaggaatcgttgccatggtgaagaaaatgggactggaaaaccgtatggaatatatcacgttctctctacatgccatgaaagagtttatccgtctggctcctgccggtactccggtatattaccttaacggagaattgtctcccaaagagctgaaagaactgggtgctgccggtctggactatcacatgggagtgattaagaaacaccccgaatggatcaaagaagctcacgacctcggcttgaaagtcaacgtatggacagtagacgaagtagaagatatgaaatggctgatcgagcaaaaggtagatttcatcaccactaacgaaccggtcatcttacaagaagaacttaaaaagcttcaataagaaaaaatattcacatattaaagaatttaatatccggctttaaagaaacggaatgttcctttaaaagaaacagattgtttctcggtgtcaaacgggtgtttccttttaaaggaaacacccgtttctttaaatgaaaaacattcttccataacattcttaatatcaacacttaaaaaacatcaacctcttacccaaaaaagaaaagagtcctttttatgaataccaataaaagattacagacaattcattgaaaatcatccaatacctcttttaattcttctaccgtaagctctcctacctgtctccaaagttcatgactcttatgcaatagaaggaaagccggtactgtttctacattatgagcatcagcaattgctctattctcttctgcattcactctaatcaattccacagttctcttttcgtaagttcgaagcacaggccctatccactcataatgaggggaccaatcggcatagaacaccaccaacaccaaatggttggttttaatagctgtttctaattgtttctctatattcatatcgctacgtttttatattaatgatagtgctaaaacaatgaatacagaaaaaggttcttcaaaacactccgcgaacaatatgatagagaaataaggattttcactttcatatcgtcaaaagaaaaaagatatatttcttgtttttataactggttttatggattatcagggctaaatattcttcatatataatggaaggatatgcaaaacaattcgctcaaataacagtttattaatatatagatatatataatttcaaattataactaaacacagtcatatcaaaggcgattataagttataagaaaataaatagatattagacatgctttttaataaaatataaagcaaaaagtcatacctttgcattgtaataaaacaaaaggatacaacaaccaataaataccaatcaaaatgacaacaaaaaccaagtttaccaaaatgcatggagcaggaaatgactacatatatgtagacacgaccagatatccgatagcagaccctgaaaagaaggcaatcgaatggagcaagtttcatacaggaatcggaagcgatggacttatattgattggtgtctctgataaagcggatttcagtatgcgtattttcaatgccgacggttcggaagcaatgatgtgtggcaatggtagccgctgcgtaggcaaatatgtatatgaatacggattgactgataaaacagaaataactttggatacactatcgggaattaaaattctgaaattgcaggtagagggaaaaatagtcagtacagtcaccgtagatatgggcagtccgcaagaaacaggagagattgattggggaaagaaatatcctttccaatctactaaagtatcaatgggcaatcctcatcttgtcacatttattgatgacattacccgaattaatctgccggaaatcggtcctgaactggagaatcatcctctctttcccgacagaacgaatgtagagtttgcacagatcgtcggtaaagacaccatacggatgagagtgtgggaaagaggatcgggaattactcaagcttgcggaacaggtgcctgcgccacagcagtagccgccttcatcaacggacttgcaggaagaaaaagtgatgtgataatggatggagggacagttaccatcgaatgggatgaaacctccggacatatattaatgaccggaccggcaaccaaggttttcgatggggaaattgttgaagaagttgagagttgagaatggagagttgagaatgaatagtaatagaaacttaaaacaataacaatatggcattagtaaacgagcattttttaaaattaccgggaagttatttattctcggatatagcgaaaaaggtaaatactttcaggataacacatcccaaacaggacatcatccggctaggtatcggcgacgttacgcagccacttcctccagcctgtatagaagcaatgcataaagcggtagaagaactggccggcaaagatacattccgcggatatggtcctgaacagggatatgattttctgattgaagcaatcataaagaacgatttcgctccacgcgggattcatttctcggcatccgagatttttgtcagtgacggggctaaaagcgataccggaaatataggtgatattcttcgccacgacaatagcgtaggtgttacagatcccatttatccggtttacatagacagtaacgttatgtgcggacgcgccggagtattggaagaagaaacgggtaaatggagcaacgttacttatatgccttgcacaagtgagaacaactttatcccggaaattccggacaaacggatagacatcgtttatctctgttatccgaacaacccgacagggaccaccttaaccaaaccggaactgaaaaagtgggtggattatgccttagcaaacgatacactgattctgttcgatgccgcttacgaggcatatatccaggacgagaatgtcccccactctatctatgagattaagggagctaaaaagtgcgcgattgaattccgtagtttttcaaaaacggcaggatttacaggagtacgctgcggatataccgtggttccgaaagagctcactgccgccactctggaaggcgatcgcataccactcaacagattgtggaaccgtcgccagtgtactaagtttaacggcacttcttatattacccaacgggcagcagaagccgtttacagtgcagaaggcaaggcacagattaagaaaacaatcgactattatatgaccaacgcaaaaatcatgaaggaaggcttggaaaccacaggactgaaagtatacggcggtgtcaacgctccctacttgtgggtgaaaactccgaacggactttcttcatggcgattcttcgaacagatgttgtatgaagccaatgtggtcggtactcccggtgtaggtttcgggccaagcggtgaagggtatatccgtttaactgcattcggcgaacgcaacgactgtatcgaagcgatgagaagaataaagaactggctctgactgaatgaataatggatagcgggaaatagaaagttcaacatgcccccattaaacgaacatcatcattcctgcaggatcagttatccataatcagttatctataaaaaacgatagtattttgcgcgctactatataacaaatggaccgtacatccacatttttctaacttttaaaggtaaaaagacgatgaaaacgacgattaacaacaaattgggggtaataacagtagcattattactgtcaggacttgtcccgtctacaatgatggcacaagataaggtagaagcttccgttggggcagatttggtaagtggttacatctggcgcggtcagaatttaggcggagttagcgtccagccttcactgggaatctcttacaaaggtttatcactcggagcatggggatcagtaggaattgaatccaaagatgcaaaagagtttgatttaactctcggttattcaattggtggatttagtgtttcaataacggattattggtttgataaaacacatacaggggatgtagatgaatacggaaaggagatttatacaaccaataagtatttccaatatggggcctattctacagcacatgtatttgaagcacaagtgggatatgatttcggtccgctagccgtcaactggtacacaaactttgcaggtgccgacggtgtgaaagaaaacggcaaaagagcttattcttcttacctcgcacttagcgcacctttcaaattgggaggtctcgactggacagtagatttaggtatggttccctgggaaacaactttttataatggctataccagtggattctgcgtaacagacatcagtctcggagcatccaaggagattaaaatcacagattccttctccgtaccgacatttgccaaagtaacagtgaacccacgcactgaaggagcctactttgctttcggactaagtttttaagagagagaatttacaatacaaagagcgtatagggcttagaaaaggtagttagagtttagatttatcggtttgttgtatggtaacctgctatggctgccgctgccctatacctctttcttttacaggacacactaatatttaaggtatatgaaaaagattgaagctatcatccgtaaaaccaaattcgaggacgtaaaagacgccctactcgaagcggacatcgaatggttttcttattacgatgtaagaggcattggaaaagcacggcaaggacgtatctaccgtggcgtagtttatgacaccagcaccattgaacgaattttgatctctattgtcgtgcgcgacaagaataccgagaaaacagtgcaggctatcatcaaagctgcacagaccggagaaatcggtgacggacgtattttcgtcattcctattgaagacgctatccgcatacgcactgccgaacgtggtgacatagccctctacaatgcagaacaagaacgttaatcggcagcggcaaggtgccgctcccaggtttccttgcggattataacgtttataaagaggtttacaacatcactaataaaataataggtataaaataagataattattatggatacaaaatataaaagccatagcttcgtaaagctgtggatagccactactatattcattttgtgctgttttactactgatatgtcggcacaaaacacggccgctgccgatacagttgcagcagttacagaaacaattaccgaagtcgttaccgctcctgccgaagaagcatcagcagctcccgatacggttggtgaattagctcttggattgaatactgtatggatgttgcttgcagcaatgctcgtattcttcatgcagccgggatttgcattagtagaagcaggttttaccagagtgaaaaatactgccaacattctgatgaagaactttgtagacttcatgttcggctctttactatactggtttatcggtttcggattgatgttcggtgcaggcggattcatcggaatgccccacttcttcgacctttctttcattgataatggtctgccaaccgaaggattcctcatattccaaaccgtattttgtgcgacagcagctacaattgtatcaggagccatggcagaacgcacaaaattctccatgtatatcgtctacaccatctttatcagtgtactgatttatccgatatccggtcactggacatggggcggaggctggttgatgaacggtgaagaaggttctttcatgatgagtctcttcggaaccaccttccatgactttgccggttctacggtcgttcactctgtaggtggatggattgctttggtaggtgctgccattcttggtccccgtatcggtaaatatggtaaagacggcaaatcaaaagctatcccaggccatagcctgactattgccgcactaggcgtattcattctttggttcggatggttcggattcaaccccggttctcaattggcagcagcaaccgaagccgatgctatcgccatctcccacgtattcctgacaacgaatttagcagcttgtgccggtggtttcttcgctctgttggtgagctggatgaaatatggaaaaccttccctgtcattgacactgaatggtatcttggcagggctggtaggcatcacagcaggatgtgacgcagtatctcctgcaggagcagccttaataggtgcaatatgtggtgttgtaatgatattctccgttgacttcattgacaaggtgttaaagatagacgatccggtaggtgcatcttctgtacatggtgtttgtggctttttaggaactattcttacaggtttgttctccaccagtgaaggtttattctatggttacggtttcggattcctcggtgcacaaatattcggagcattggtagtaggtgcatgggcagcaggcatgggattcatcattttcaaaacgcttgataagattcacggacttcgcgttccggcacgtatcgaagaagaaggtcttgatatttacgaacacggagaatcggcttacaactaatttagtgatgaacggtttagtgattagtgaaagacagctacacacaacttactactaatcactaccccgctaatcacagaaaaaacttccggacaggtttgatcgcctttccgggaaccacataacaaagtaattatttactctaacatatttaacaacaaatcaaatcaggtattatgtcaaaacttagattcagagtagtagagacagctttcaaaaagaaagctgttgaggtagcaacacctgccgaacgtccttcggagtatttcgccaagtatgtattcaacaaggagaagatgttcaaataccttcccagcaaggtatacaatgcactgattgacgccattgacaacggtgctccgctagatcgcagtattgccgacgaggtagctgccggcatgaagaaatgggccattgaaatgggtgttactcattatacgcactggttcgcaccgctgaccgaaggcacagctgaaaaacatgatgctttcgttgaacatgatggcaaaggcggtatgatggaagaatttactggtaaactgcttgtacagcaggaaccggatgcttcttctttcccgaatggcggtatccgtaatacattcgaagcccgtggttacagcgcatgggacccctcatcacccgctttcatcgtggatgatacgctttgcatcccaactgtgtttattgcatataccggcgaagctctcgactataaagctcccttgctgaaagcattgcgtgccgtagataaggctgccgtaaacgtatgtcgttacttcaacccggaagtgaaaaaagtagttgcttacttgggctgggaacaggaatactttctggtagacgaaggattgtatgccgcacgtccggacttactaatgaccggtcgtactttgatgggacatgacagtgccaaaaaccagcagttggaggaccactacttcggtgctatccccacccgcgtagccgctttcatgaaggatctcgaaattgaagcgttaaagctgggtattcctgttaagactcgtcacaacgaagttgccccgaaccagttcgagttagctcccatctttgaagagtgtaaccttgctaacgaccataacttgctgattatgtcattgatgcgtaaggtaagtcgccgtcatggcttccgcgtactgcttcatgaaaaaccttttaagggtgtcaacggatcgggtaaacacaacaactggtcgttgggaactgacacgggcattttattaatgggaccgggtaagactccggaagataacctgcgttttgttaccttcgtcgtaaacacattgatggcagtttatcatcataacggattgttgaaagcttctatctccagcgctaccaacgcccaccgtctgggagctaatgaggcacctcctgccatcatctcctctttcctagggaagcaattgtcgcaggtattggatcacattgaaaacagtacgaaagatgatttgattagtcttagcggcaaacagggaatgaagttggatattccgcagattcccgaattgttgattgataatactgaccgtaaccgtacctctccttttgctttcaccggaaaccgttttgagttccgtgccgtaggttccgaggcaaactgtgcgtctgccatgattgcattgaactctgccgtagcagaccaattggtgaagtttaagaaagatgtggatgctttgattgaaaaaggagaacctaaagtgtctgccattctcgaaattatccgtggatatatcaaggaatgtaaagcgattcattttgacggcaatggttacagcgacgaatggaagaaagaagcagcccgccgtggactggattgcgaaaccagtgttcctgttatcttcgataactacctgaagccggaaaccattgccatgttcgaagctaccggtgtaatgacaaagaaagaactggaagcccgcaacgaagtgaaatgggaaacgtatacgaagaagattcagatcgaggcgcgtgtattgggtgatttggctatgaaccatatcattccagtggccactcaatatcaaacagatttaattaataatgtctataagatgcaatctcttttcccggcagaaaaggcagcgaaattgtctgctaaaaacctggaacttattgaagagattgccgaccgcacagccttcatcaaggaacatgtagatgcaatgattgaagctcgtaaggttgcgaacaagatagaaagcgaacgagaaaaggccattgcctaccacgacacgatcgttccggcactggaagaaatccgctaccacatcgataagttggaactcattgttgacaaccagatgtggacgcttccgaaatacagggaactgttatttgtgagatagagaaaaagaacggtgaacgataaatggtgaacggtgaaccaattgcactgcaacgcatttaccgtttaccactcacagttcaccgttatgaaattatctatttcttttgttggttgttttaagtttgcggggaggggtgctgtgaagcagtcctcttcttttttattcgattatctttgcatcctcaatatcatcatcgtcatgtaccaccggagtcttcggacgacgacgggtaaacttgaaccagttgattaattcggtaagcgaataaaccaaactactcacaccaataattataaatgcagtattacgtgctcctgtcggattaaacaaagcgatgatacctgcaataagaatcaatgaaggaaccaggtaaaacgctcccggaacaggcatccaccgacgtgccatcgataaagaagcaatctgttgcactcctcccattatcaggataaatcccaataaaaacatcagaacatctgcaaagaattcaggcatcacaatcagccaaagtccaaataataaactgccgattccttctatcgggaaacggggagccgcctcaccttcctgtcttttccggccgaaatagccaaaaaggctgataacaccgggaattaaaaaggcaacaccaactgtaatgacaatatagctggcagccgcatttggccaaatcacgagtaccaatcctatcacaagtgcaaagagaatacgaataagggaataattcattgtcttcataaattctatattttttaaccgagtctgttccaatacttttgcgaatataagtgtttctactgatatataaaaataacaaataaacattgtaataagttcgtaataatatcgttatgacgattacatcccacattgatatttttgcagaaaatttaaacagttctctttcagtatgaaacaaagtaaaataaaaaagatcactgcaagatatatatgaaacattgaaagctctctaccgaacagcgtatcaagcaatataagttgaaaccggaccgggccgatgttattgttcctgctgctgaaatatttcttgagatagctactcatgtgaaagccaccggaattattgtacctaccatcggactgttcgacggtatcatcaatagtctgtacacgcaaaatatgaacaaagtttaattctctacaatcttgatgtatcaatacacaaagctcctgatactagtgtatattcaaactttgtatcgggagtttttgtctcatcttgctataatgtacagattcgtccttaaagaggtaaatattcaaattttgttctctatatttgtgcaactatatatttgataagatggatataaaacttagaattgagcaaccttcggattataatgaaaccgaaaatgtcacacgggaagccttttggaatcatttttctccggggtgtgacgaacattatctgctccatatcatgcgtaaccatcccaaatttgtaccggaactcgatattgttgcagaacttaatggcaagattgtcggcaatgtggtctgccttaaatcatttatcatggcagatgacggtaaccaatatgaagtattgagtctggggcctatttctgttcttcccgaatatcaacagaaaggtattggaggaaaaatgattgcgctgaccaaagaacgagctttcgatatgggatttcgtgccattttactttgcggtgatccggattattacctccggcaaagattcattcctgctgaaacattagggattcgcaccgaagataatatgtatgctactgctcttcatgtttatgaattatatgataatgctttagccaacgctaaaggacgttacatagaagatgaaatatatcaggtcgataaatcagctgctaatgagttcgataagcgattccctccaaaggaaattatagttggcactccgtcacaaaagcggttcgatcagatagtagtgatgcggagaaaagcgatttaagtttattcaaccttaaatcgcttgatttgtacattacggaagttctatcgtgctatgccatcaagcaactattattcaacatagctactattctttgtctcttcatagttacaaagcattaaaatatataattgtaacagagagaaaaaatgccttaacaattgatgaaacctatcttatagaaactatagtttacaaaaagtcaccattgacactttgtaattcttaatctaccaggaatcgtttctttcctcccttttattggaataaagagtttctgtcactgtagaggaatttgctcaaatcgttattctataatcaggcacgatatatacactttttgatacatcatcaaagattttaccaccaaaaagatattatctatactaataaagttcccttttattcttttctatttatcattatcaaagaccgaagtagaaaaatcaatggaaggaaagtagaaaatactaacaatatttacgacatagcgacactatcccaatggtttgcttactctatccatagcttttggtgacattatccgcatcttttgcttactttatccttatgtttttcacaaatataacgatgcttttcaatgagaaacacggtgcttttgtacaaaacaagcaaaattttcagcattttaaaggtttttgcttgctaacagagaaaaataacaaaacatgtgagatagcaaaatccctgattacacaaacaatcgtcagtataatcagggattctaaaactttatgtaaaaagtgtagagatgacgaaaagtttagtactgaatcaccttgtcactactaacagtcttataccaatctgtggttgagctctgatcgtgtgcccaatctgcaaatttagaatatgcattcgttatcactgttgtttctgttggataagcaaatttatcaggaacacaaagagcccaagtattattaactgccttgattacttcgagcacttcattatctgctaattggccattcgccgtagccgaattaaaatgagtcaaatggatttccgttctcttttgacctatcccctgataagcaatgaagaagtctaagccatctgtcacactagggacagatattgtattcttaagtttgacgttcacttcaagaatgtatatatcggtcagaggggtactagcattccctgtattcaacatgagacgttgtgctcctgtatatccatatataatgtgcgtctcctaaatgcgctgtcactgtgccgttttcaatcgctgccggttgaaccagatagcgtttgtgctcatctatgcgtgcaacaaacaccttatcaagcgctgttgcacaatccatcaccacattcaaagtcgtactttgattgacagttccttccgctaagagttttgctgtacttcccggacttaatggatcggcatcaaatatttgtatcttataatctactccctgatctccattaactgacacatgcgctgtcacacttcgtgacactgtccaatcaccatcaggatcgatgttttttacaggaaaagtttcttcgtaaatttgcttcagctgatctgcatcaaacagatttttctcattatcaacacaactgataaaactgatggaagacgccaacaacgagaaagtgaagatttttgcaatgttctgtttcataatcttttaatgctttagtttgttttatttgcgaaaaacataaatcactactaatcaataatcagcaatgaacacacaaagataattgtatttataaacattatacagattacattgcattttccgatttgcagttaacatcttttaaagcgcctcactctaattatttatattagaagacagttagttatatcgttgaatataaaaattttaatactatttattcaatagtatacagcaaaaaaaagagttgcatggaaatatgcaactcttcataaaaagacaaagactaaaaggggaaaatcaatggcaatacaaaaatcatcacgattcccataataatctgcaacggtaatcctacttttacataatccataaaagtatattgtcctgcaggcattaccaaggcattaggcggcgtagagaacggagaagcaaaacacatacttgcacctaccgtcacggcaaacaagaaaggaaccggactgactccaatctgtatggcactttgcaaagcaatcggagcaagcaaaacagcggtagccgtattactaataaacatcgtcatcaacgaagtcgtaaaataaatacctgccatcaatgcaactggtccgtatgatcccaaaccgttcaccaatgtattggaaatatattccgaagctcccgttttctccaatgccagagacataggaagcatggcagcgatcaatacaatactttcccagttgatcgttttataagccgcttccacattgcggaaacatcccgtaagcaccatcaatatacccgctatcataacggctgtaaccggagctaccggaataaaatcaaaaaccatcattgccaccattaacaccataatagcagctgctaccggagctttataatctaacgtaactttagccgcttccgccaaaggttgtcccaaaacaacccaatcagcatcttccttactaagacgggctatattattccatgttccttgcaccaaaagcacgtcaccactatgaatacgctcattccccaaatcttgcaataaatattcctttttacgacgaacccccaatacgttcacattaaacttatcacggaaaccagcttctttaattgtctggtttatcaaattagaagatggcatcaatactatttcagcaataccgatatcataaaaatcaagcgaattagtcgtactttttgtttcttccgttgcatgatcgcccaagatctccagcaggtaatcttccgcaaagagttgcaccttatcaaagtccccagtcacatacaaaatatcctctacttctaacatcgtgtccggtgcagcaaacttttgagtaatcgttttcagaaaacgatgttgcgatgcatcaccacgacgaacttccataatattcaaaccatatttacgacgaatatccaaatcgattattgtctttcccaaaagccgtgaatcttttatcacctgtaaacgaaacaaattactggaaagtccatattcattaaccaactgtttcaatgacttgcccgaacgtttattatcatctttctgtccttttttagaaagaaaccatttactaagcggcatcagaaccagtgtaccgacaattacacagacaatgccgacaggcaggaaagagaagaaagaaagcggctcaagtccggcggaagtcaacgtattctgtatcacaaggttcggcggagtaccaatcagagtcatcatacctcccatactacttgcaaaagccaacggcatcaacagcctgctgggattcatgccggcactcatcgccagactaacaacaataggaagcatcaatgccaccgtacctgtgttactgacaaacgcgccaatgacagaagtcaccaacatcaccaatagaaacaaccggatctcactggttcccgcaagtttaagaattcgggaactaatcatttttgccagtcccgtctggaaaatagcccctcctacaacaaacaatccgatcatcataatgactaccgaattggaaaaaccggagagtgcctcgtcaggagttaatatctgaaaaacaagtaaggctatcagcgcacatagcgccacaatatccgaacgaaccttgccgttcacgaaaaagacagccgaaagaacgagaataataatggttatcagcatacgtaattaaatgattgttttattttgactctatcaaaactaatttaggtgaacaaaaatagaaaatactccagcgttattaaaacaaattagaaatgattttagttcatgagacatcatttaatattttaatacattttacctctaaaaaaagaatcaaaattaagcaaaatatcataccatacaggaaataaaagacaccatacgtccccatttatccatcacattttattacactgtcacaatataaggttgaaaatcaatatatttatgtattatcttttgataattcagagaacaattcatatctttacaaccttatttatatcaaacattttatggcaaacaatattttgttaatttcttggattagtgaagcatattggagttataattatttactggtaattattttactccttatcatcagcatcttattatatagaatccgtaaattacaaaaaacgattaaaaaaaccaatcattcctaccgtttctcttttgacattctcgacaaccttccttttcctatcttcgtaaaagacattacaaatgatttccgatactattactggaataaagaatcagccgctcaatccggcattagcagtgaagaagccatcggacatactgactacgaaatatacggagaagaaagaggagaaaaataccggaatatcgacaaagaactcgtacaagaaggcaaagtataccgcaaagaagaaaaatatatcactcccgatggaatcacccatgatacgattgctgtaaaatcaattatttcatgggaaggggaaaaaagatggctgctcgcaacccgatgggagatcactcaactcaagaattatgaaagagaattggttgcagccaaagaagaactggaaaaagcattgaagaagcagaaactagctctaaaaagtattgacttcgggcttatctatattgataaaaattaccgggtgcaatgggaagaaacaagacaaatcgccagcctggtaaaaggaagacgatacataccgggaaaaatttgctatcagaccagtgcacttcgtaatgaaccatgtggacaatgtgctttcaagaaagcaatcgaacaaggcaaaataatccgacatacaatcagagtagacgatgtcgattttgaagtgaccgcaactcccgtttttggcgacgaaaaagaaactgaaattattggcggattacttcgttttgaaaacatcactgaaaaactaaaaatgaacagaatgttgcaagaggcaaaggaaaaagccgaagaatccaatcgactaaaatctgcctttctcgctaatatgagccatgaaatacgaaccccactaaacgcaattgtaggattttccgaaatggtttgtcagacagaggaggaagaagagaaacaggagttcgtgaaaataatctccagcaacaacatcttattattgcaactgatagacgatattctggatctttccaaaatcgaagccggtactatggaattcacatttgcgcaaactgacattaatgaactgatggaaggtatttgcagacaaatgcaagaaaaaaactcttcaccggacgtacaaatcgtattcacagagagagcaaatcaatgtattattaatacagaccgcatacgcttatcacaggttatcatcaactttacaaacaatgccttaaagttcacttccaaaggttctatcgaaatgggataccggattgaagaagcaagtgatgaaatatacttttatgtaaaagatacaggtatcggaattcctgctgacaaaatagacaaggtgttcgaacgtttcgtcaaactgaattcgtttattaaaggaacaggtctcggactagccatctgtcgtgtcatagtagagcggctgggaggagttatcggagcggaatctaaagaaggagaaggttcttgtttctggttcaaaattccaagaacagagaaaattgagaaatagtaagcagaataccgaaaagccttggatttataaaatcattctttctactgctactgattatgaagtataccctgtaagatgataatactgccccgctactttacattattaccactactaatgaaatgtaccccaaaagttttatatccaacttttagggtacacattttatttagcaagaaggatttttcggaaaccttcttattctataaacttcatgtaagagtgtgcctaaagtgcagtctctaatattctacgagcaacagcacctgttacatttccattctcaccatatttagcaccacgttcattgaagcggcgttcgatttccagaatagtttcctgtccgatgttctcttcatgcaaacgtgtagtcagtcccagtgaacggaaaaattcttcggtacggcaaattgcttcatcaatccgctcttctcttgtaccggaagtaattccccaaactctttcaccatactgcaaaagcttatcccctttttcttcatgaagcacttgcaacgtggcaggaagaacaatggctaacgtatggccatgtgtcaatccgtgcaaagcagtaatttcatgcccgatcatgtgagtagcccagtcttgagacactcccatagcaataaatccattcaatgccattgtagccgaaagcataaaatcagccatcagttgataatcatgctggttttcacgaattttcggagcaatctccaccaaagtttgtagaataccttccgcccaacggtccataacgcgactctgtccggaagtagtcatatattgctccatcacatgaacataggtatcagccaatccacaagctacctgatgaggtggcaaggtaaaagttacttccggatcaagaatagagaagattggatagttggcataaaaaggatatttctctttcgtttcgcgacgggaaataactgctccgttattcatttccgaaccggtagcaggcaaagtcaatacagtggaaagaggtacagtatgagttaccgggcgtccggcaagtactaaatcccaggcatcaccattatacaggattcctgcggaaatcaatttcgtaccgtcaataacagaaccgccgccaacagccagcaaatagtccactttctcttcttttcccaaagcaatcgctttacggagagtttcgatggcaggattgggttcgattccccagaattctaccgtaaaatggtccttcaatgcttcctttacctgatcgtacactccgtttttcttcacgcttccgccgccaaaagtaatcataatacgtttgtcggacggtatttctttagccagccgggcaatcatcccttttcccatgattagtttcacgggattttgaaaaataaaattttccatatcttagtctattgttattattttggttattagtcactatccttgcaaagatacatgatttatccgaagcctgtcagaatcaagcaaagaattgttgtgccacggaaggaaccatagccgacaaccagggtttcatatcctctgctaccaataaccaatacaataataatataatgaaaatggcaatagcgatacctactaaaacttttctctgtttcataattgtttttgtttaaatattcaatatttataagaacagttctggttgaaaattgttctatatcagaaaaatgaaggcaaaagagaaaaaaagtcatattttgtttgctgtttcaaacaaagtgtctatatttgcccccataaaattacaaaagacaatgagaacaatgttagtaaatacatattggtggtggcgcccgttacaactccgacagtcgtaagggagcagtgctcgtatgtatatacctcattaaagatataacaaatttgaaagagccctgtcgcaacctgcgacagggctctttttatttacccgtttcaaaacagattcaataataacataaaaatacagataggattatgaaaagttttttagttgaccaggatggctattacggagaattcggcggtgcttacgtaccggaaatcctccacaaatgtgttgaggaactaacgaataagtacctcgaagtgattgaaagcgaagattttaaaaaggagttcgaccagttgctacgtgactacgtaggacgtccctccccactctatctggccaaacgcctttctgaaaagtacggttgcaagttgtatctgaagcgggaagacctgaatcatacaggtgctcacaaaatcaacaacaccatcggacaaatcttactggcacgccgcatgggaaagaagcgtatcatcgccgaaaccggagccggacaacatggagtagcaacagctaccgtctgtgcattgatggatatggaatgtatcgtttatatgggaaagacggacgtagaacgccagcacatcaatgtagagaaaatgaaaatgttgggagccaccgttatccccgttacttccggcaacatgactctgaaagatgcaaccaacgaagcgatccgcgactggtgctgtcatcctgccgacacttattatatcatcggatctaccgtaggtcctcatccctaccctgacatggtggcacgtctgcaatctgttatcagcgaagaaatcaaaaagcaactgcaagaaaaagaaggacgcgattatccggattatctgatagcctgcgtgggaggaggaagtaatgctgccggaacgatttattattatatcaacgacgaacgggtaggcattatcctggcggaagcgggaggtaaaggaatagaaaccggaatgaccgccgctaccatccaactcggcaaaatgggaattatccacggagcacgtacctatgtcatccaaaacgaggacggacagatagaggaaccatactccatttccgccggactggattatccgggcattggtccgatacacgctaaccttgccgcccaaagccgtgccaacgtattggcaatcaacgacgacgaagcgatagaagctgcctacgaactaaccaaactcgaaggtattatccctgcattggaatccgcccatgcattaggagctttgaaaaaattgaagttcaagccggaagatatcgttgtattgactgtttcgggacgaggagacaaagatattgaaacctatttgtcgtttaacgaacagctataaataattagtcaaccatcattcgcaatcaataatcaagcaattatagaaatgaaaacatttaattatactacccatagcaaacaagtgctcggagatatgcatactcccgtcagcatttatctgaaagtacgcgacatgtatcctcaatccgcattaatggaaagttccgattatcatgccggagaaaattccctgtcatttatagccctttgtcccttggcaagcatcggtgtaaacggtggcattgtcactgccaactatcccgataatagccgtacggaagaaccgctgacaaaaacattcaatgtagaaaaggctatgaaccggtttatcaataagttccaggtgaccggagataataagaatgtatgcgggctttacggatacacgacgtttaatgccgtgaagtacttcgagcatatcccggtgaaagaaagtcatgatgagcaaaacgatgctccggatttactatacatattatataagtatgtcattgttttcaatcatttcaaaaatgagctgacattagttgaaatgttgtccgaaggagaagaaagcggtttgccggaactggaagcagccatcgaaaaccggaattatgcttcctataatttctctgtaacaggccccgtaaccagccccatcaccgacgaagaacacaaagcaaatgtgcgcaaaggaatcgcacactgtatgcgcggagatgttttccaaatcgtgctttccagaagatttatccaaccatacgctggggatgatttcaaagtttatcgcgcactccgcagcatcaatccttctccttatcttttctatttcgacttcggaggatatcgtatctttggttcttcaccggaaacacattgcaaaatcgaaaacggccgcgcctacattgatccgattgccggaaccacccgtcgcacgggagacacagtaaaagaccgcgaattgacagaggctttactggccgaccctaaagaaaatgcagagcatgtcatgctggttgatcttgctagaaacgatctttcacgtaattgccatgacgtacgcgtggtattctataaggaaccgcaatattatagccatgttattcatttggtaagccgtgtcagcggtatgctgaatgaaggcgcagacaaaataaaaacgtttattgacacgttcccggccggtacgttaagcggcgcccccaaagtacgcgctatgcagttaatcagtgaaatcgagccacataatcgtggagcctacggtggttgtatcggttttatcggattgaatggcgaattaaaccaagcaatcaccatccgtacttttgtaagccgcaacaacgaactctggttccaggccggaggaggtatcgtagcacgcagccaagatgaatacgaactgcaagaggtgaacaataaactgggagcactgaaaaaagcaattgatttagctgtcaaactaaaaaattaaccgtcccaaatagtcagcctaaaaaataattgctgttgcctgaaaaaagattcccgttgcctaaacgcttctatttctttaggcagaaaagcagagatagtatttgaacaaccattttacaatgacaataaaaatgaaaatattacttttagataactacgactctttcacttataacctgctgcatgtagtgaaagaattaggggctacagatatagaagtagtccgcaacgaccagatagagcttgatgaagtagatcgttttgataaaatcatcctgtctcccggaccgggcatacccgaagaagccggcttgttactacctattattaagagatacgctccgaccaaaagcattctaggggtttgcctgggtcatcaggctatcggcgaagccttcggagcacgtctggaaaatctcaaagaagtatatcatggcgtacaaacttcggtaagtatcattcgtcaggacctgctttttgaaggattaggaaaagaaatccctgttggaagatatcattcctgggtagtcagccgggaaggctttccggactgtctggaaataacagcagaaagccaggagggacaaatcatggcaatccgccataaaacgtataatgtacatggtattcagttccatcccgaatcagtattaaccccgcaaggaaaagaaattatcaaaaacttcttaaacgattaaacttatgaaacagattctatacaaacttttcgaacatcaatatttgggacgcgatgaagcacgcaccattctacagaacatcgcgcaagggaaatataacgatgtgcaagtggcctcactcatcaccgtctttctgatgcgtaatatttccgtagaggaattatgcggtttccgtgacgcactgttggaaatgcgtattccggtcgatttgagtgatttcgctccgattgatatcgtaggaaccggaggtgacggaaaaaatacattcaatatttctacagcttcctgcttcacagttgccggagccggcttcccggttgtgaaacatggtaactatggagcaacgtcggtcagtggtgccagtaatgtaatggagcaacacggtgtaaaattcaccagtgatgtagaccaactgcgtcgcagcatggaaaaatgtaatcttgcttatctacatgcccctttattcaatccggcattaaaagcagtagctccggttcgtagaggattggcagtgcgcactttcttcaatatgctcggtccattggtaaatccggtattacctgcttaccaactgttaggagtttacaatctaccgttacttcgcctttacacctatacttatcaggaaagcaagacgaaatttgccgttgttcatagccttgacggatatgatgagatttctctgaccaatgagtttaaagtggcaaccagcgatcatgaaaagatttacactcccgaaagcctcggcttctctcgttataaggatattgatctggatggcggacaaacaccggaagatgcagctaagattttcgatcatatcatgaataatacagctacggaagctcaaaaaaatgtagtgatagtcaactccgctttcgctatccatgtgattcgtccggaaaagacaattgaagaatgtattgctcttgccaaagaatcattggaaagcggacgtgcattagcaacactaaaaaaattcattgaattgaatagttaatttgatttacgattagcaagtctgattataaatataaaaacaaacgaactgatgaaagatatattatccgagattatagcaaacaaacgatttgaagttgacctgcaaaagcaggctatttctatcgaacaattacaggaaggtatcagcgaatctccgactccccgctctatgaagcaagcattagcctcttccgcatcaggtattatcgccgagttcaagcggcgctctccttccaaaggatggatacaagaagaagcgcgtccggaagagatcgttccctcctatgcagcggcaggtgcctccgccctttccatccttactgatgagaagtttttcggaggaagcctgaaagatatccgcgccgcacgccctttggtggaaattcccattcttagaaaggacttcatcattgacgaataccagctttaccaagctaaaattgttggtgcagatgccgtacttcttatcgcagccgcactggaaccggaaaagtgcaatgaactggcagagaaagctcatgaattaggtatggaggtcctactagagattcatagttccgaagaactggcgtacatcaacaaaggaatagatatggtaggtatcaacaaccgtaatctgggtactttcttcaccgatgtagaaaactctttccgcctggccggacaacttcctcaagattcggtactggtatctgaaagcggcatctccgatccggaaatagttaaacgcctccgggcagccggattccggggattcctgatcggcgaaacatttatgaaaacacagcgaccgggagaaactttacagaatttcctacaagccattcaataaactaattattcaaaacggacagccctatgattaacggaaaaattatcaaagtatgcggtatgcgaaaagctgaaaacatacaggacgtagagtctatcgaaggcatagatatgctgggattcatcttttatcctaaatctccccgatgtgtctacgagcttccggcttacctgcccactcatgcccggcgtgtcggcgtcttcgtcaatgaagacaagcaagtggtcagcatgtatgcagatcgtttcggactgaatgatgtgcaactccacggaaatgaatcaccggaatactgccggtctttacattctaccggattgaaaatcatcaaggccttttctgtagaccgccccaaagacttgaaaaaggtgtatgactacgaaaaagtctgtgatctttttctgttcgataccaaatgcgagcaatatggtggttcgggaaatcaatttgattggagcatattacacacatataacggagatgtacctttccttttgagcggaggtatcaactcatacagtgccaatgccctgaaagaattcaagcatccccggcttgccggatatgatctcaacagccgtttcgaaaccaaaccgggagaaaaagatccggagcgtatccggacatttttaaacgaattaaaatcatcactttaaaattccaacgtcatgaatagaattaatcaacttttcaatagcaacaagaaagacatactttctatttatttttgtgccggcacccccactttagatggtactgccaatgtaatccgcacactcgaaaaacatggagtaagcatgattgaaatcggtattcctttcagtgatccgatggcagacggcattgttatccagaatgccgctacccaagcattgcgcaacggcatgtctttaaaacttctttttgaacaattgcgggatattcgcaaggacgtaaaaataccacttgtattcatggggtacttaaatccaatcatgcaattcggatttgaaaacttctgccgtaaatgcgtggaatgtggtattgatggtgttatcatccccgatctccctttccgtgattatcaagaacattatcgtatcattgccgagcgctacaacatcaaagtgattatgctcatcacaccggagaccagcgaagaacgggtacgcgaaatagatacacataccgacggattcatttacatggtttcatcagcagcaactaccggagcacaacagaatttcaacgaacaaaaacaggcatacttcaagaaaataaaagatatgcatctgaacaatccgttgatgataggatttggcatctccaataaagcgacgttccaggcagcttgcgaacacgcttccggagctatcatcggcagtaagttcgttactctgctcgaagaagaaaaagacccggaaaaagccatccttaaattaaaagaagcggtgaaatgatttatgatttatgaattatgatttatgatttatgcgaatcagcagttgaatccaggtcattggtaattctaataaattaatcaagtgtgagggatgtgagggaggttcacatgaatgataaatctacaaaatcattcgaaaactcataaatcataattcataaatcataattcataaatcataaatcactattttttcctatctttgccagcgttttaacagtaattcaacaattatgagagcagaaaccccttccgttttgttaatttacacgggtggaactatcggaatgatagagaatccggaaacaggtgccttagaaaacttcaacttcgatcatttgcttaagcatgtacccgaactaaaaagattcaactaccgcatctcttcctaccaattcgatccccctctcgactcttcggatatggaacctgcttactgggcaaagctagtaaagattatcaattacaattatgattattttgatggttttgtcatccttcacggaacagatacgatggcttacacagcctctgcattaagctttatgctcgaaaacctaagcaagcccgtcattctcaccggttcccagctaccaatcggaactttgcgcacagacggaaaagaaaatctcatcacagccattgagatcgcagctgccaaaaacccggatggtacggccattgttcctgaagtatgtattttctttgaaaatcatttgatgcgtggcaaccgtaccaccaaaattaatgcggagaattttaacgctttccgctctttcaattatccccccttggcacgggtaggcatccacatcaaatatgaacctaatctcatccggaaaccggacccgacaaaaccattaaagccacattatctatttgacactaatgtagttattttgaccctcttccctggtatccaagagagtatcgtaacttctctgcttcatgttcccggattgaaggcagttgtcatgaaaaccttcggttcaggaaatgccccgcaaaaggaatggttcatccgccaactaaaggaagctaccgatcgcggaattatcattgtcaacatcacacagtgtgcctccggagcagtagagatgggacgttatgaaacaggaatgcaccttttggaagcaggtgtaatcagcggatatgacagcactcccgaatgtgccataacaaagctcatgtttttattgggacatggattacccaacaaggatatccgatataaaatgaactcctgcttaataggagaaattactaagtcttaaattaaatacacttaatataatcctttgattttcattttaagcagttttataaaagtgaaaatcaagggatttctcttcatcatcaccgagacttcatcaaacctaaacgagccaaagaagaaccaaaacggaagtatagttgttttcactctataaaataacagaaaaaatatttccaataaaagatatgcagttatttttgtgatggatttggttacaaacaatcaagcaataatacattatgatgaagaaaacagttcaatttgtacccattattgcaatagcaatggcaggtactatgtttagttgtgtggactccggaaaggatctctatgatccgtcttatgaaacacctaacccgatgggagacggctttgctgctcccgataatatcgattggaacatgataaccacaaaaaatgtttcagtcgaggtgaaagatgaagaaggagggcaatttgcttatttaattgaaatatatgcagaagatcctttgactaacgaaaatgcttccgtactcgctacaaggacagctaacaaagaaaacaactttaaatttacagctgctgtcagcctgctccccactcaaaagggtatttacgtgaaacaaaccgacccaagaggacgtgaacaggtatatcagttcgatgtgtcgggaaacagcgataatattacctgtaagctctattatgcagaatctgcagcacagaatagagcattaatgagtcgtggtgtcgctacaagaagcctcgcatttgaaaaaccggattattcttccataccagctgatgctaaggaagttacagaaatgtcaggaacgactttactgcgtaatgctaattacaaaatcacctctgactataatggtatattcaaatttgacggatatgacggtgatattgcaaccagagtttatgtagatgcccaatggactattcctgcaactttccaattccagaacggaattgaaatcattgtgatgaacaatgcaaagattaatgcatcaggaaccatgacgttcatcagaaactccatgctcactatcatggaaaaaggagaagtaaacgcagacgatgtatcattcaccaatggagcacctgctgcattaagaaactgggggacactggctgtgacaaacaccatgactctacattccggtgcaacgctctacaacaaaggaaccataaccagcaaaaatatctcgatcaactctaacacaaaaattgtgaatgacaataagatcgagctggaaggtgaattaaatctgccatctaatttctcattggaaaataacggagagatttatggagagaaattaattgcaaattctgatgctgttgctaccaataacaacatcatgagatttacaactataagcctcaccaatacaacattcaacaatgcttgcagcctggaagccacaacttctttctatgcaaacggagcaacattcaactttacccaaggatatttaaaagctcctacgatggagtttgttaatgggacagtcaacttgagcaatggttctatgctggatgcaactacaagtatttacatgaatacagctcatgctaaattttacggaaagggcgaaaatacttctatgataaaatctccggttataaccggacaaggttttacgtatgacggaaacttagttattgaatgtgataatcatgttgaaaagagcccatattggaacaacttctatgtacaaaatggcgcatacttcactaaaatgggagaatccaaagtcgtgatagatgtctgcacgggtactaagaataatggaaatgaaggagaagaaccagaagatcctaaattcccgatcatcatggatgacactcgtaattacgcttatctatttgaagaccagtggcctttatatggagattacgatatgaacgaccttgttttgattatcaaagaaagaaagatttccatcaacaaggataataaggcagaagagttcacgctaagtcttgatttatcggctgccggagctacgaagagcatcggagctgctatcatgctggacggtgttcctgccagtgctatcacacaaccggtggtgttcagtgataactctcttgctaaaaactttaatgtgaatagtaataagattgagaacggccaggactatgctgttatcccattatttgacgatgctcacaacgcattgggaagagaccgttacgaacagattaataccattaaagatcattctgccaatacgaatcctaaaaatatcagtttcactatcaagttcagtaacccaatttctgtggatgagcttaatatcaacaaactgaatgtgttcatcttcgtagaaggaaacagaaaccagcgtaaagagatccatatcgtcggttaccaacccactaagttagcaaataccgacttgttcggaggcaacaacgacgatagctctacttcccgcaaaagatattacatcagtaaagacaacctggcatggggaatcatggttccgacagacttcaaatggcctttggaatatgtgaatatcaaatctgcttactcgctgttcgaaagttgggtaacaagtggcggtactaagaatgaagaatggtggaaaacttttgattcatcaagagtctataaataagccaaacagtcaatcatcaacacggatttcatgaaagttgaaatccgtgttttttcatcaagatactgttagtcgcaattaatagaaaaaaaacatatatcacgaattttactctccagaatggagattattctaaaataatatctatatttgcagtgtatcacaaatataatgtgacaacaatctcaatcaataaatcaaataacaaagcaagcgatagaaaggtctattcgtatgaagaaaaaaatattactagtcgacgataaatcgacaatcggaaaagtggccggtgtgtatctaggaaaagagtatgattttacctatttggaagatcccatcaaagcaatagaatggcttaatgaaggcaatgtacctgacctcattatttcagacattcgtatgcctcttatgatgggtgatgaatttttaagatacatgaagaacaatgaattattcaaatcaattcctatcgttatgttatccagcgaagaaagtacaacggaaagaatcagactactggaagagggagcagaagactatatcctgaaaccattcaacccattggaactcaaaatccgaatcaaaaagattattgactaataccgggtcttctacacatgcaatattttgtttatataggcagagatagcaaaacaatagaactactctcccgactaagtattggggtattctatgctgcgtccaattgtagcaaagctgtcaaagtattggagaaaatacgcgaaaaatatgacgcagccctatttttcgaacaggtgaacttatcccaagatattgcagatatccaatacatgcgcaaaaaatatccgggactttatatgatactcgtcatcgattccttgtctaaggaagaagcatccgaatatcttaaagccggcattaacaatacaatcaaatatgaaacgagccaagaggctttaaaggacttatcgactttccttaaacgaagaaaagatcagaaaataaaggcacttcagcttaaaacacaaaatattaatgctttccggttgcctttatggaaacgaacttttgatatattcttttcgggaatggcgatattatgcctttctcctctcctaatatttactgcattagctatccggttagaaagcaagggccccattatctacaaatccaagcgagtaggaagtaactatcagatattcgacttccttaaattccgttcgatgtacactgatgccgacaagcatttaaaggatttcaatgctcttaaccagtatcaacaggaagatgaggatatttggggggaagaactggaaccggatattaatgaagaagccgacgaagaagaaatcctcctgatatcggacgatttcgtaatctccgaagaagactacatcaacaagaagtccaaagaaaaaagcaatgctttcgttaaatt

SEQ ID NO: 8465 - DNA, 199 bp, Unknown
  gut microbiota DNA sequence
cgaccgtttcatggggccggccggattgaccggtttatggcaggtagagaaaagaggcgaagccggtaaactttctgccgaagaacgcaagcagttggatatcacctatgcaaagacattctctttctggctggatataaagattattctgaaaacagttactgcattcattcaaaaagagaacgtataatctcctttc

SEQ ID NO: 8466 - DNA, 771 bp, Unknown
  gut microbiota DNA sequence
gcatttaactcatgtcggtgcagttttgattcttttcaccacagaggacacggaggacgcagaggtgaatttggtttatgacttacggttgtgaccctaattttgacgcgtaatcctcatactataaagttgaaaaacataaaaacatctgccacctgcaacgaaaagcgtgtaatgcgctaattgataaatagttggaacgtggcagatacctgcggcagataggttgcagataaagtatctgccacacgttatataatcaaagaaaaagtcttgattccttgatgcaaagctatgggataattggggcgactctatggataatttgtggtgtctctacggggaaacgacagtatccttacgtagaaactgtagtgtcccgccttagaaactctcgtttcctaccgtggaaactgtaatttctaatgcaggaaacgacagttccccgtctggaaacgggaagtcaatgtatacaataaacttttgccctcctagagaattagcttatgtaaggtttatactgtgttgcagataaagtatctgcaacctatctgccacagtatctgcaacgttccaactgtttgtcaactagtgtattacacgcgtttggttgcaggtggcagatgtttttatgttttttcaactttatagaggaaggattacgcatcaaaattagggtcacaaccgtaagtcataaacccaattcacctctgtgccctccgtgtcctctgtggtgaaaacagtgcaaaaatgaactattcaattaaataa

SEQ ID NO: 8467 - DNA, 361 bp, Unknown
  gut microbiota DNA sequence
tactttgttatttatagagtgagacttatagcgaacttaaactagaaagattatgaaagtaaagcagatttgtatgatggtgctactatggttgggagtgattccggcggtgcaggcacagactttcgacaaattatggaaagaggtggagcaagcagagaaaaagagcttgcctaagacagtgataaaactgactgatgagatttatcagaaaggggaaaaagagaaaaactctccgcagatgctcaaagcatacgcgtggcggatgaaataccgggaaatgttgaatccggatagtctttatgccggtctgaaaggactggaacagtgggtgaaacaaaccgaccaaccaatggatcgt

SEQ ID NO: 8468 - DNA, 1094 bp, Unknown
  gut microbiota DNA sequence
cgtttcttacgcgcattttattatttcactttggtagaaggttggggagacgtgcccttcaagaccacttctacggaagatgcttttaacctctccattccgcggacagacaaacagacgatttacgacttcatcatcaaagaaatgtatggttctgccgaggatctcaaatctgctcaagatctgaactatttgccgggacgtgtttccaaatcggcagcttggggaatgttggcgcgtgtatatatgttcagagccggcgaacctaaacgtgacaaagaagtgggtttggccaacaatacgactagtgctgagattacagaatatttcaagaaagcaagctactatgcacagttagtcaagaatgaaggtcattcactgactgccaaatattgggatttctttatcgacatttgctctgataagtataacactgctctcaataaggatggcgctaaagccaatgaaagtatctgggaagtagaatttgcaggtaatcgttctactgatgtacgtgcagaaggcagaattggtaatatcatcggtattccgggcaaagacctttcttccaaatcatccattactggtaaaggtgatccgggttacgcatacgcttttatctggagtactcctaaacttctggaactatatgaagccaataatgacattgaccgttgtaactggaatatcgctccattcacatatacccaatctgcaggagaagggactccggtagatggccgtgaatttgtgaaaggaaaaagagacgaagtggaacaacaatattgggacaaatccttcagctatggtaaaacaaatccgggttctacttacggtgatcgcgaatcgaagaatgatgccaataagaaccgcaacagggctgctgccaaatatcgtagagaatatgaagcagataagaaaagcaagaacgatacttctatcaacttccctcttctccgctactcggacattctgctaatgattgcagaggcagaaaatgaagtcaaccatggtcctaatgatctggcttatgaatgtatcaatgcagtaagagagcgcgccgggatcagtaaacttcaagagaatctggatga

SEQ ID NO: 8469 - DNA, 7943 bp, Unknown
  gut microbiota DNA sequence
cagattagtaaagaaaaacaatgaatttagcgtaaggccaattcaatggttttcataaaagataaagcaaaaaatgtgcagtcactcaaggagttagaataaaccgaagcaaaaggttcgattcctggtggcaccacaatcgattcggtaataaaaaatcccttgaactttaaaagttcaagggattttttattaccttactttttgcatctacaaacacctatactttggagctatgtagttttttataaatctctatacgagcatctatttctgcttgagtcaaatgtgcaggaagttcaatggtagtccgcggagttattgctaccagcactacatctcccaaaccttttttgtactccttaatcacgtttgcagtaaactgactggatgaaataacatcgcgcattatattaccttttttcatatctcaaattatttttttgttttttgttatacacaagcagaatacagatcttcttatacagattctgtttgagctaaattttccggcttagatttgttttccaacgagatattgaccgcattcatccctttcactccacgttcaagatcaaatgttacgatattattttctgtaatattaccaacgacattgtttacatgaaaaaagtacttctcaacgccggaaagatctttaataaaaccaaatcctcttgactcattaaaaaactcaacccgtcctctcaaaatagttggctcttcatcctcttttttaggagttgctataactatttcatccgggttgatctcttcttttctgacattctctgtcggaggagttgaggttattctcccgttctcatcaacataagcaatcatatcttcaaagctgtttgagctgcccgataatttcttattttctttcttctttaatttttcttcgcgcttagcgattcttttcttttcattttcacgtttacctactgtcatggattttgccatagaaataatatttagtttatactatatttttaatgaataaataatgtaagtgcttactttcaaatagtgaaatcagccttattgagtttcttaccggttaacttttgaatatcattcactagtttacgttcttcctgcgaacagaacgtaagtgcagttcccatattccctgctcttcctgtacgcccaatacggtgcacataggtttcgggaacatccggaagatcatagttgataaccaaaggtaattcgttaatatcgatccccctggaagcaatgtcagtggcaaccatcacccgagtttttcccgatttaaagttgcccaatgcagactgtcttgccgcctggctcttattcccatgaatagcctggctgccaattccagccttacccagaatcttcacaatcttatcagcattgtgtttcgtacgtgagaagataagtactgactgatcttctgccttcgacaatatcgaaataagcaactggcttttctccttcttttcaacaaaatacaccagctgcttgatagaatctacagtagacgatttcggtgttatgtaaatcttcaccggattcttcagcagagacttagtcaaggagataatagaatcaggcattgttgccgagaaaaacaaagtctgcttttcttttggaagtttcggcaatatccgcttaatatcatggataaatcccatatcaagcatacggtcagcctcatccaatacaaaatattggatagtgtccaaatgtatatgtccctgactcatcaggtcaagcaaacgtcccggagtagcgaccagaatatcaatacctttacgcaacagatcaacctgcgggcgttgatttacaccaccaaagattactccatggcgaatacgagtatgttttgaataatcgtcaatacattcactgatttgcaaggcaagctcacgtgtgggcgtcaatatcaaggctttaattccctgacgtctggcagcctctttatccagttgcaaatgctgtatgataggaatagcaaatgaagccgtctttccggtaccggtttgcgcacagcctaatatatctctttttgccagtgcaggcggaatcgctttttcctgaatgggagttggtactgtatatcctttttctccaattgcttttaatatcggttcggttatatttaattctttaaatgtcataaatgttatttttgctgtactcaaacagcgattagttttatatatagtgggaaacccggacaatttcaatcatgaaaaagcagagtttcaatcattaagccagtctgtgggttgctaaaaaaaactcgcgttccagtgtagccattacttcttttacgctactgattttttctgcgagaaaggcattgctaccagcaaatgcatagccttttttcatatttcctctggctgcattatatagagccttaataatgcaataaggactttttgtataatcacatgtctttatacaatggaatgagcaacttttaggcctctccaaaccattattcacattgtgaataaattctccatcaatagcccttcccggcatcccgacaggactttctataataagaacatcttcggacttggaatgaatatatacttctttgaatgtttctgaagcatcacattcaagggtggtaacaaaaatactacccatttgcacaccggaagctcccaattccataaaatgcgctatatcctcacctgtcgaaattccaccggcagcaatcaccggaatctgcttttgttctttataactggatgcaatcatcaccacttccggaatcaatgcttccagagcataatgctgatcctgtatttgttcttttttaaatcctaaatgcccaccggctttaggcccttccaccacaattgcatcgggcagatagttatagtttttttgccacttgtcacaaataaccttggcagctcttgaagaagatacaataggaactaacttggttacactttccggggtcaaatatgacggcagatcaagcggaagtcccgcacctgaaaataccacatctatcttttcctcaatcgcagtacgcaccatatcggcataattagataaagcaaccatgacgtttacgccaataataccttctgtttttgtacgtgccttgtgaatttcttctctcagtccacttatacatttctccggataagagccttttcccttgggatataacaatcctaaacccgcacatgatataacgcctactccgccttcatttgcaactgctgatgccagaccggacagtgagattcctactcccattccaccttgtataacaggtgttttaatttcaatatttcctataaagaacgatttcatatgttttattttgtattggcaaaacagacagatagaagtgagcatactttattcaagtgctcaatatttggttctgtcacgaatgatttaccttgttggataatttattaaactatatacccttggctatttcaagagtattgtattacaaaaaagcctaataaatctattttcagaatggaaagtacaggattagaaattcctaattttgcatagaagagccagaattagcagaacttaaatgtaaaatgatttttcgtcttctctattcagtagagattcccccgttgaatcatgaaacggaaacagcttttaaatgaaagcagaagacagaatcttctgcttttattcggatattaatatcttctagagttattataaccaccacggcctccaccgtttgacggtctttcagtacgagggcgtgcaacgcttactgaaataaccttctggtcgtattcaactccattcagttcatcaattgctttttgtccttctccatcgttcgtcatttctacgaaagcaaatcctctggatctaccagtttctctatcaaaaataactttggctgaagaaacttctccaaactctgcaaataaatttgttaagtcggcatcagttgtgccatagcttaaacctgaaatgtaaatgttcatctaaaaattttattaaaataaatactattttggagtgaggaggataattacagaagaggactacttactaataatatattaaaaagaagaactacacaataatgattcgtaactcaaactctgggaacaaaggtaacacaataaattagataactatgtttttattctatatttttcaatagaagctcaattattatcatttgttagcatgtcaatcacacaaaacagtcacaattagcaattctctcattcattcttgaccatttcccataatatatctatttttgttccagaacaattattaagatacacccaacaaatatatccgagaatgaaactaaacactacaattagagaagaaatgtgggcaaagcagcatctatctgctaccgacattgactatgctgtatgggagcgggataaatccatgcttcatcaactctcgaaaatgggccgtaactgtacatttgttgtcgatgtttataaatgcaaatatgcttacgcctctccgaattttgttgatttactgggatacgacagccacaagatagaaacattagaaagacagggtgattatctggaatcgcgcatccatcccgatgatcgcgcacaactggcggcattacaggtcacactaagccaattcatctatagcctgccttttgagcaacggaatagctattctaacatttacagttttcgtatgcttaatgcgaaacaacagtacatacgtgtcgccagcagacatcaggtattggaacaggaccgcaacggtaaagcatggcttatcataggaaacatggacatatcacccgaccaaaaagcctctgaaaccgtagattgtaccgtcctgaatctaaagaatggagaaatattttctccttccctatcgttaatgccttctaccaatcttactaatcgggaaatagaagtattacgtcttattcaaaaaggcctgttaagtaaagaaatcgcagacaaattatgcatcagcattcatacagttaatattcatcgacaaaatttgttacggaagttaggtgtacagaattccattgaagccattcgtttaggacaagagagtggattgctaagttaatacatgcaatctttctccccgcactgtgatccaatctggctagggcatccattccaccacacccaccaccggatgcaatcttctccattcctcaaattccggataactacgtacaccatcctgaatcacagcttgataatactccactcccataatcttttccgtatcaggcgtttcgtattttaatttcaggatagccagtctcatttcatctgtcaataccgcagaaatgcgttcggccaccctttcaaagtagccatcataacgagagccttcttggatatgaatcatatccatttgccaaagttctccctccatatcctgataccatgcatgccactctatacacgcttctgctgtatgtaataaattcgtatattcaatcttctttacggacgtattttccgccaattcagccatcgcccgaaagctggcagacaaatccaaaggagaagtataaatatgaaaatcaatatcccgatgtttcatcaataatcctgtacgcaacgaacctaccagattcactttggcaccaatcccttcccatatccgaacaatacgggtatcctctataatctcccaagctttctgctggttacgttttgccaattcaagaatattcatctttttccttattaagtaagtatgcaaaaataggaaaaaggatacatatatagctataaataactatttaatcccttaatgggttgagctaactttgtccgcaaattcaattcttcaccatacaactaaaaagagattatgatattcaatcaaacagagaaacaggaaaaagagtatttacagcaagtcataaccactatccatgatacgattaacactaccagtacttccgtcaaagagcatatagacaccctgcaggagtacaaggattatctatggtcgaacaaagatatcgatccgcacgaaatccgttccatgcgcgaaagcatcttaaatcattttgcattaggcgaaaatgtaattgacaaacgcaggcgactaagcaaaatactggatatcccctatttcggacgaatcgactttcaggaaaagaaagacaaaagccaagttagtccaatctatataggaatacatactttctatgacctcaatcaaaaaaagaatctgatttacgattggcgagctcctatttcaagcatgttctacgatcatgaattaggcgaggcgttctactcctccccggcaggcaaaattaacgggacgatctcactcaaacgccaatatcgtattcgcaaaggaaaaatggagtacatgattgaaagttccgtaactattcatgacgatattctgcaaaaagaactatgttccaatgccgacaataaaatgaaaaatatcgtcacgacaattcagagggaacagaatcagatcatccgtaatgaaaacgcttctgtacttattatacaaggtgttgccggttcaggaaaaacctctatcgctctccatcgtattgcctacctgctttatgcacagaaaggacagatttcttccaaagacatattaatcatctcccccaataaagtatttgccgattacatttctaatgtacttccggaacttggcgaagaaaccgttcccgaaaccagcatggagcaaattctgtcggatgtaattgacaacaaatataaacaccagaatttcttcgaacaggtgacggaactattagaaaacccgacacccgactttatcgaacggattcaatacaaagcctccttcgagtttatatcactacttgacaaattcatcctttacatggaaaacaactatttcaaagcaacagacgtaaaactcaccaaatacatcaccattcctgccgaatttattaacgaacagttcaaacgattccaccgctatcccatacgtcaacgatttgagactatgacagattatattctggaaatgatgcaactacaatataatctcacagttagcactccggagaaaaaccaactaaagaaagagataaaaaagatgttcgcgggaaataacgatctccaaatctataaagatttttttgactggatcggaaaaccggagatgttcaagacacgcaaaaaccgcatactagagtatgcggacttagcccctttggcttatctgcatatcgcattaaatgggaataacgcccaatcttacgtcaaacaccttctgatagacgaaatgcaagactattctcccatacaatacaaagtgattcaaaaactttatccatgtcgaaaaacaattcttggagacgcttcccaatccgtcaatccttatggatcttccactgctggtatgattcaaaaagcatttgcaacaggagaaataatgaaactttgcaaaagctatcgttctacttttgagatcaccagttttgcacaaaaaattcaaccgaacaatgaattagaaccgattatgagacatggggaacaccccaagattcttccattcaaaaatacagaagaggaaatccaaggtattgcggatttagtaaactccttcaggaactctcattatacctcattagggatcatctgcaaaacagaatcccaagcaaaagaacttgttcaaaagctccagatatatgcaaacgacatctcacttttgtcaaatcaaagttctgcttatgtgaaagggattagcatcacttccgcccatatggcgaaaggactggaatttgacgaagtaatcattccgcaaacagatgataagaactatcattccaatattgacaaaagtatgctttatgtggcagtcacaagggctatgcacaagttaactttgacttattctgtttcttcacccagttgtcgattcctataatagatgtgtattcaaacaaacatcgaaaattaattaaaagaaaa

SEQ ID NO: 8470 - DNA, 250 bp, Unknown
  gut microbiota DNA sequence
actcatcaaccgttggaacaggcggttggcacatagcctgcctgccgaaagagatgtccaaagaaataagagagaatctcggattcttagaggaaggctggggacggttgaagatgacgaccaaaatcggcaatacccaatgggaaaccgcaatctggtttgacaccaaacttgatacttatttacttcctctcaaagcggaaatcagaaaaaaggaaaagatcacaactgataaagaaatagagattat

SEQ ID NO: 8471 - DNA, 1814 bp, Unknown
  gut microbiota DNA sequence
acaacatggttatcgagctaatacaaccaccggtctatattccttttttctgcactgaactccactccaactttaaccaactcacgcccgtctacctgataaggtatcagatagcctttttcatcaatctgctgcaaagcctgttcggcagtaccattcagtttaaattcaaatacataaatatacttcggagttttcaccactgcatccgcccgtccgcgggcactacgaacctctgctccggtaaattgccccatcagtttgaaaactaaataaaatacaacctgataatgtcgttcggtcttttcattcagttcataagggaaatctgcgaagaaagcctgcaagcgggtaagaaaagcatcaacatcaccactctccaattcacgtacaaatttaccaagataaaagccccgttcatcatctaccactgatgtgtaataaggaaccaaaaaatccataaatccatatcgtacttcatcattgggaaatttcagcaggtagtttccaaaacgcttgtcatacccctttatagtcaaatagccactctgataaatcaacggaatcggattattagcatctaccctatattccataaacgaagaagcattggcttctaccccatcaatcaacgtacgcaaatcatactcactctttttaagcagttcgactaaaaaagtaggagtaccggtttggaaccaataattactaaacttatacccgtcaaaaacgttaagcacactgaatggattgaatactccttccgcaaactcacaaaaatgataaccgtcatataaagccgtcatcttatttaatgtttcttcacaagtcagttcatttgtttctgccaatcgattcagttcaggagtaaaagtatcctccaattcttgtcgtgtaataccacaaatcgtggcatactgcggcttcatactgatatcattcagttgattcaaatcactgaacacactgacttgcgcaaacttagtcacaccggtaaggaaaacaaaacgaagataacggtcagaacttttcagtacaccatagaaggccttcaatgtcttacgatagtcatcaagcaaagcgtcatcacccaatgcctgcaacaaaggtttatcatattcatccaccaagactacgactccacgaccagactgttcacaggctcggcgaattacacccgcaaaacgtccggagagagtttcctcatcctcccctttgccatatttcagttcccattgcgtcaactgcctgctaagaatttcgactaaagcctggggagaatcatatttttccgcgtttaaatccaaatgaaatagcggatatgtcttccattccttttccatatcagctatggccaacccttcaaataattctttcttaccttcgaaataagcttcaaaagtagaaagaagaagactcttgccaaaacgacgaggacgacttaaaaaataaggagtctccgttgaagcaattctccatacaagagcagtcttatccacataaagataatctccttcgcgaagtttctcaaaagtctgtattccaataggaagtttacgtaatatcccgtccatgattttttctctattttgattattcaaagatacgcatttccatgggaatacacatacaaactccacaaaaaagtacacagtttcacagacagcactaccatgactccatttttcatcaaaactaactttgtaccagacaaacaacatctcacttcctcttcactttgcaaatccaacacacaataaccagaaccagcaaaataattccgtaccaataccaacctccggttgtcctattag

SEQ ID NO: 8472 - DNA, 1498 bp, Unknown
  gut microbiota DNA sequence
tcccatcaacaagaataagcaaacttgtcccgaatacacaaattgcaccaaatcatccaataaacgtcctgttccaaacatactacccgacagtccttcgtttgaaatcatggaagcctcgtcgacaataaacaatgtattggtagctaaattgtcattgatcgaaaagttactaagctcattagaaaaagattgttgtctatatatttttttatgaatagtaaaagccggatgtcctgcatacgctgaaaaaacttttgccgcacgtcctgtaggagccaacaatacagatttctgctgcagctgatccatcgttttcaccaatgcccctaccaacgatgttttaccagtaccagcatagcctcttaagataaagacttcatctgccagtgtggacagcagaaactctgaaagagattttacagcaatttcctgctctaaagttggctgataaggaaaattttccttaatttgcctttctaaatagttatttatcatttttgtacgagaaaaaagttcgaggaactatcgtatttaaatttatttattctatttttgcgatgcgaatataacaactaaaaacataatttatcatgaaaacagtatttaatattgtattggtgctttgtgctgctgcactgatttacatctgttacaccagcattatgggtcctatcaattttgaaaacgcaaaaaaagaaagagaaaaagcagtcattgcccgtttgatcgacatccgtaaggcacagcaggaataccgttcgctgcaccgcggaatgtatgcacccaaattagacacactgattgatttcgttaaaaatcaaaaattgccgttcgttatgaagatgggaatgttaactgacaagcaattggaagacggactgactgaaaagaaagccatggctatcatcgaaaaagcaaagaaaaccggtagatacgatgaagttaagaaatggggacttgaaaacttcaaacgtgacactatgtgggtagctgtattggatactatctatccaaaaggattcaatgccgactctatgaaatatattcctcacggaaatggtgctcaattcgaaatgaacgtgaaaaatgacactgccaagtctggtgctccagtatatttgttcgaagtgaaagctccatacgaaacttatttgagcggacttgacaaacaagaaatcatcaacctaaaagacctggattctaaactaggtaaatatagcggcttgatggtaggttctatcgatactccaaacaatggtgctggtaactgggaataatgattgattttactaaatcaaaacaatatactttatccatccgtcttagtacggatggattttctttttctatctataacccgattcatgacgattcgctttcaataatagagaaagagatagacacatctctatcccttacagccaatctaaaggcggtctttcacgaatcggacttcctaaatcatccttacaaacgggtaaatataatgatggca

SEQ ID NO: 8473 - DNA, 369 bp, Unknown
  gut microbiota DNA sequence
gcgccattagacttatttgaggagggacaggcggaacttctgttttatcataatcatcagaaaagagaaaacgaaacggtgctctataatattctaagaaagaataatgtagctgtcatcttcggcatagacaaaagcgcacagacctttttgaatgaacaatatcccgaagctcgtttctattctcaatctactccattcatcgattatttttctgtaaaaagcagattgggaaacagtaagaagatgtatgcttctgtacgcaaagacggtattgacatctattgttttgaacgaggacatctgcttctggctaattcctttgaatgtacgcacacagaagaccgtatttactatttattgtacgcc

SEQ ID NO: 8474 - DNA, 469 bp, Unknown
  gut microbiota DNA sequence
accgacaaaattgtgctcaatgcgtcgatagtagttgtagccattctggttgtactcacctatttcaaatctgccaaccatctccaaatgcctcaacttcaacacagcgattggactcttgacggagacaccgcaggagtggatacattgggcaatataggttattcaaaaaacaggcaaagcatcaatagcggaaacaatgcggaaataaaaaaacgcattatacacgatttctcttgctattatgccatttataccttctgctacaacatgaaacaagccataactaaaggatacaaaggagaaggtttgctaaccctcaccgaagaacttgtagaaaatgacgatttacttgtcatctccaataccgaatttaaatggttattgcaacaattcgatttctcaaacttctctcgactattacaggcatacgcaagtggcaacaggagcttcaggagtgatttcaccg

SEQ ID NO: 8475 - DNA, 1160 bp, Unknown
  gut microbiota DNA sequence
gattccatattcgggacgggcagttatgtcagagacctgcactttccactcctgctccacttccggaaaatcatcggatatatcaatctgtgctgtcaaagggcggccgatgtaatgacaaagattcatacttgcaagacggagggcgttatcagcctttcgcaaagaaagttcactctcgttgagcttcacttgcactttcagtacatcattttgcggtttcatgccatgccgatgagcactctttacatttttggaaagttccgtcagtaaggcgtgatatttttccgctacttttttcatctccttggctttcactaactgcacgtatgctttatctgtattcagaataacttccgaagtagttaaagcttcgttcaaatgtgccatttcctttcccaatagtgacattttataggcggcacggatttttcctcccatataaagaggttgctccacttgtacaccgcccgagtaaacagttccgaccttatagtccagattcagtccgggaaaataagcgaaaccgctcgataccagttctccggtagcaggattgggcaagaaaaccggaaggtttcctcccggaactccgagacttccgtccgctgtgctataaatacccgttccgttgactgtaaaattagggaagaaattggctttataactaagagacatcaatcgggctgcttccgtctgcttattagcggcagccatatccttattatatttcagtgccatttcacggcattgcgccagacttagtttttcttgcgcggcaagagaaaccgacaggccgaacaatacacccgctacactaatggctacaagaatttcttttttcatttgtctgtcttttttatatgaaagaataatgcatacaaaatcgggataaaaagcaacgttatcaacgtgccgaacagcaacccacccataatagaagccgccaacgaaccgaacatggcatccggcaacaatggaatcattcccaaaatcgtagtcagcgaagccatcatcacgggacggagacgactttgcgaactgtctatcaatgccgtcacaggttctactccctgattaatctgcaaagtgatctcatccatcaatacaataccattcttaataatcatgccgatcaatcccaatgtaccgacgatagc

SEQ ID NO: 8476 - DNA, 1241 bp, Unknown
  gut microbiota DNA sequence
cagtccttctatatgaagcacggcggacacttcgcgggtcagctttttcggaacgaaatgaaggtggtaaagtccgtccggcgtctcttccgacgaacgtgaaggagccgtccgcccgtaggtggtctggctataatttcccagcatatcttccgtaacagtgaaacctttcagcgtggctgccgccaattcatcgggggaggaaatgattgtgcgtgtttccacacgtgtctttttgtccacacgcgtctccactttgcgggcatatgcttccagtgtctcataactgttgccacggaaagcaatgttgctgaaatcgttgaacgaacggttgaagacaatgatgtcatacactcccatcggcaggcgtactgcgtcgcccgaacggtcacccatcatgaagattttcggttcgccgccattccgcggatagaacacggctgtggcaccgtatttttgctctttgtcgtccaatcccgaatcattccagtcggcagttagggtaatctccgatacttcatagtaggtcaggtcacgacgctcgcaggagacaagcaggatggaaacacataagagacagaagaacagtagctgtccgttgcttgttattaaccacttatcactcattttatacctcctttcctcactttacggttcaacagccagacgagagagagcttggcttttgtagggccgaaccaggtgtatttgccattctcctgccagagcaaggtctggtagttgtcccgtgcatggtaatgccggtaatcggtacgtagcataccaatacctatattgaattccaagtgcagattgcgtgcaatccgtgttgcccagccgtaactgatgcctgcagcaataaagaattctccttgataaccgttctctttccactgaaggtcgtatttacctcctccggcatataacccgaagaaatgcccggtcagcacttcgctattctcgcgcttctgatggcttcccaaccagtagcggccttccagaccgcccataaggatttgcatggagtacttgtcgccgtcgaacagccaccacgggaacatatattcaccatttatggaccaacgtttgccgatggggacttctatttctatattcggcatcatggcgacgtcgaacagaagattcgttttcaaggcaaatagcgggcgtttattttttgcaagctgttcctgctgtcggacttgctccatagttcgccttgtttcttctgtcaagggatt

SEQ ID NO: 8477 - DNA, 1307 bp, Unknown
  gut microbiota DNA sequence
ttcaactgcgccttgcgcttttccgtttccggtgtgcaatcaatgatttgcaacacttctttttgtttgggcaggttcgcgtcttctgctatcatacggcgtaattcctgccagttttcaccttgcggacacggaaggatacggcacttgtcgaggtggggatatttccatatcaggtaattcctcaccgcatgagaacgccgcattgccaggcggttgttgtaggatggaacaccttcgggcgaagcgaaagacagtatgtatattgaatctatccgtgcggtcggaatactgtccgagaaaagttcatctaaacggcgtaatgtgcgtccattgtccatatagccactgtctaccaaagctttgtcaaagcggaaataaagcaaggcaggcttgacagaaatttcttcggtatgctccttctgtgcaaagatatcagcagaaagggataatagtaaaccgaaaagaaaagcgaggcgttttaaatatgtaggtttatttttcataagttgatgtgtgtcatttttatgtgtactatacggttaccagtcggatattttgattcctgtcagaagcatccgcgtaacctggttgagcacgcctgtcttttgagcgacttgcatattctgcaaatagagggattcgggagtagggcggatacaataaataggttcgcccaatgcttcaagtatatctaataaggaaaggtcgttcaaggagcggcacaatacgtaggatgatattatgtttgcttcacagttcggtaacaatcgtataatatgtccttcctctaatttatggaacagattttcccattcttcctctgtaaaccggaagttggctgaacggaagtagatacctgtagaaatatcatgcaggatcgctattgctgcttgtgtggcttgtgttaacatactttgcgttttaatttatctgttacttaccaagtaacggctgttgttcataattaagcagcggtgaaaagcgttttttcgtaggcttgatttataatagaaagacttttctggcgggaaaagtgcatgaaagaatgtttcatttttggagtacagaaatgaactgggggcgtatgcccttaagaagcatagtcgtgataatatgttgttttgtcaggttttgtgtcagtatatagttctttaatattgaaaataaaagaagattttacaatatatatttggatatatgaagaaatattcactactttgcatcgtaaaacgtccgttacttggtaagtaattcagactggtatttccgttacttggtaagtaatagtttctcttctaatctgt

SEQ ID NO: 8478 - DNA, 292 bp, Unknown
  gut microbiota DNA sequence
ataggggagcataatctggtaggagaccctgtctccttcgttaatcaggaactggaataatccggtgacggactcggtatcggtgcagtggaactcttctgtcagcagtctggatagcttttgcggatggactccggtctccatggagttgagatagaagccttgcagtccagcttccatataaccgatgcgtagtcccttctttttctctgttccgaggatgagattcagagggttgtgattgaatcgtaaggttctcgtgtaagcgtccatccttaatacctccataaag

SEQ ID NO: 8479 - DNA, 459 bp, Unknown
  gut microbiota DNA sequence
gcagagtgattggtattataatcatgtgaatcatctgtattgaagtagccattgttacgagtatacattgcattcacgaaatatgtacttttttctgttcctccttgaatattaagattatagcgttgactccatcggatatccttcaaatatttatcagcccaatctacattgggatataaaatggaattaggatcattcttagcataattcattatatcatagttcgaatacaagggatccagattatcattatggcgggctatgttgtgctgtcttgcataatcggctgcgtttaatgactttaattctttaagtggttgttgagctataatttgagctgtcaattcaacctgcggtttcccctttgctcccttacgagttgtaaccagaatagctccactgcctgcacgcattccatataaggctgttgctgcagcatctttcaatacggtaatt

SEQ ID NO: 8480 - DNA, 1141 bp, Unknown
  gut microbiota DNA sequence
tatctcctcaaaagttaatctgcgatgctgaagcagcgtgttgagcaaccagatatagcggttgaaggttttacttatcattttctaaacttccgtgattttcaaaatattattactattttctattattcaattgcttaaaccctttttgtatatctcatctaattgtttttcctactttagatatcttgatagcatgttttatagggtagaattcataatcttatttagtacaaagttaacttttttgtatgcaaaaatactgcataccacctaaatatattaatttatagcaattttttttatgtgtgcaacgtttctgcatacttcaccattatttttgcacactcattttaacattctattggtcatggcatacaaaaaaaatccaaagaaaaaagatgctctcaatataaagagagctgtagaatctctgcgtttccaaattgattggggtttaaaactacttggcgcaaagaaaggagatctatttcatcaattagcaaaagtagaggttgatctcatctcagagctcaacctcacccaagatattcttgctatcaagagcctcgtggatggagtgaaacagaatttacagatagaacctacacccgaaagtggagacttcacccatagtatcgttgctctcgctcttggcattgcctcaattagccaccttaacaacataagtttaccagaatcatggagagaccagatagagaaaaagttgcttacaatctattatccagaaaagctgcgtaacaaaatcgtagattgggcaaaagcgaacggttacagcacctccaattaccttggccgtccaatcgtgaaattcaaccaattatacttaattatagaaagaacaagataaatcagccttttttgctctgatcttcgcattttttacaaaatacgctcattccatattaaacattccattctactaccgataaatatccatccagttacaacaaataagaactttcatgatcatctttacattgaatttatacgcaaaagaaaggggctgtctaacaaatccctaaaactggaaatcacctctgtcagagttcaaactctgacagagatgaaatcgttaaaaagagacttgttagacagtcccctaaaatctttattaggt

SEQ ID NO: 8481 - DNA, 312 bp, Unknown
  gut microbiota DNA sequence
cttgcaaagtaaacgataatctttcaaattgcaatattcagtttgcagatattgttaggaatttataaaagagtttcaattagggaaaaatttctctaataccttcttcctttccaaagaaagtattacttttgtagccggatttacaaggggctatccaaagctccccatgttaaggtgaaaagagatagaaaacaaaataccaattttaattaattcaaagaaaatggcaaatttagatttaagcaagtacggcatcacaggtgtgaccgagattttgcacaatccgtcttatgatgttttgttcgctga

SEQ ID NO: 8482 - DNA, 206 bp, Unknown
  gut microbiota DNA sequence
ctgtggcagataggttgcagataaagtatctgcaacacgttatataatcaaagaaaaagccttgattcctttatgcaaagctatgggataattgggatcactctatggagaatttgtggtgtctctacggggaaacgacagtatccttacgtagaaactgtagtgtcccgccttagaaactctcgtttcctgccgtggaaactgta

SEQ ID NO: 8483 - DNA, 343 bp, Unknown
  gut microbiota DNA sequence
cagttccaatgtgggggcccttcctctcagaacccctatccatcgtagtcttggtgggccgttaccccgccaacaaactaatggaacgcatccccatcgataaccgaaattctttaatagtaaaaccatgcggttttaatatactatcggatattaatctttctttcgaaaggctatccccgagttatcggcaggttggatacgtgttactcacccgtgcgccggtcgccatctttagtttgcaagcaaactaaaatgctgcccctcgacttgcatgtgttaagcctgtagctagcgttcatcctgagccaggatcaaactcttcattgtaaaagtatctttt

SEQ ID NO: 8484 - DNA, 210 bp, Unknown
  gut microbiota DNA sequence
catcttcactcaaaaggtttcctccctgagattgaagttcaggacttccctatccgtggtaaagccgtttatttacgtatcaagcgtcgtcgctgggaagatccatccactgggcagacatatagtcgtgactggagtttggtagccaccggtactcgcataaccgctgagttcggtgcttttttaaaagaattacttagataatcacgc

SEQ ID NO: 8485 - DNA, 772 bp, Unknown
  gut microbiota DNA sequence
ttgaacccgggacctcttccttaccaaggaagtgctctaccactgagctataacagcaagaaaagagagcggaagacggggctcaaacccgcgaccctcagcttggaaggctaatgctctatcaactgagctacttccgcattcttgccaaagttgtcactctgattgtgggcaaagatggattcgaaccaccgaaggcgtaagccagcagatttacagtctgccccatttggccactctggtatttgcccttttcaaaatcaagaaataaaagaactattttcaaacaatatgataaagacagatgttctatctttgttcttcggtttctttttgagcctcttgtcggattcgaaccaacgaccccgagattacaaatcacgtgctctggccaactgagctaaagaggcaaacttactaaaaaaagcaaccgtcacgttctaacgcgagcgaaacggctgcaaatttagctatttatttctttcccgcaaaatatttgggatttttttatttgctacgttgcttttccttgtatttaaccagctgttttccgagtgcttccacatctaaatcaattgcttcttcaaatgtatcgcatactttgcttgcataaaactctccattggggatcaatattttaatgcccgcttccttgttttcagcaacttctggtttaactacctttaatgacacctctactttctttatatcttcgtaatatttttccaacttggacactttcttctgaataaatgcctgcaattgctctgac

SEQ ID NO: 8486 - DNA, 70628 bp, Unknown
  gut microbiota DNA sequence
attaaatctttaataaacaaaaataatatattatatatctaaatcctaaaatgtacttcattaggaaagacgtatgactacaaaatatgtaatcacttaaataaaaaaacgttcttaattttttcgtttggtttatcttagaaaaaatattcgatcatatattccaccatagtcaatcataggttgaggagtaattaatcatggattttgatacaaaccaccacttgattatgactctcgaaaattactgttgaaacacttctttcaaatacttaatattcgtaccataattctttttcacgttccgcacgtcattcttgtcacgcgaacgttctaccaccagccatccactccatcccatcttatccagtgtctttttcaccttattcatatccaatcgttcattataaggtaaagtcactccatctgtgtccgtacagtgaatctggcaaatcctctttttccccagaatcttcaactccttgcacaaatcccttccattctccaatgcattttgaaatttaaaatagatcttgattccgggagaattaatttctttcagtagtttcacatctccttttgcatccagttgagtttcaataccaatcaccactccttcagaagctgccatatctcctacctccttcaagcgttttacaacttctgtccgtagtgccggaatcttttcccatccggctttgattcctcccaaaggaagaaaggctactttggcattcatcactttcatggcatgaaggcaatcctgaactaaatctttataattaacccgctccagaaaagactgtccatagaaaccggacatagcaatagaagaaacttctaattgatatttttgagcagtttcacgaaataactgctggaaatggggctcgcgcaatttattatcaaacatttccctcttgccaagaccacccatatccaattctacaccgtcaccattcaattcatgtaccaattggaatgaaccgattttctgacgtttcagaatcatccagtcacatacggctattttataacgttgttccttttgctgcgatccggcaattgccaatagaggaaaacactctgcaagtatcaatatccaaaggatatgtttaaataaatttcttctcattttttattttattgcatacgatttacatagtagacgtacggaatagatttttgtaatcacctataaaacagagaataactaaaaatactacggagtataatttaataaaagtaagatagtgacggtatccaagacaaatagtgacgctatcttggtccgataccgtcactatcccaagcatataccgtcactatttccgatgaagtaataacagaaataaatgtaaaaaaataggctgccgaactataagaagtccgacagccctgtcaacccaaaaacgatacctatgaaacactgtgtgttatttcaaatcaaactttaaatatttgccgtgaacaagttcatcatgtgtgatatgatatttattgaacttcttgccattcaatagtaccttatcaatatataaagctcctggttgagtccgattggtttcaatcaccagttcgttctctttataccatttcggatctaaccggatcgttaccttattaaagaccggagtcgtcaatgtatattcgggcagtccgggacaatccggataaaaaccgatcatattgaaaatagcccaggaagacatcgttcccgtatcatcgtttcctggaataccatcaggtttggaagtaaagtacttgtctattaaacgttgcgtctctttctgtgtgcgccattcttcacctttaaaatatgagaataaatgggcataagcaatatccggttcatttgccgggtcataaagcccttcgtcaaaaaccatttgtagcttatcaataaaaggtttcttcccacccattagttttgccaagccatatacatcatgtggcacatagaatgtataattccaggaattaccttcatggaaaccgggattcggttcaaagttttctccttgtctcggattaaacggactgtaaaaagttccatccggaagaatcggacggaaagtaccaaattctttgctataataatgtttgtatcccagagaacgcttgtagaatatctctgcatctttctttttacccaaagcctctgcaaagcgagataacgcaaaatcagcaatataatattccaatgcatgagatacggaattgtcatactgttcgcgaagaggcacatatcccttggacatataatcatcattatcaggacgcatcaagttttccgctccgggtaatgtagcagatttatacattgcttcataagccaaatcaacatcaaaatcacgcaaacctttcatccaggtatctacaattaccggaatactcggatcaccttccattgtcaatgtttccctgccatataattcccatttaggcaaccatccatgttcgcgatacatatcgagcattgtacgtaccatttccatctgacgttccggataaaccaaagtcaacaattgatgaacattgcggtaagtatcccaaagagaaaagacagtatagcgatctccttttgttgtcaaaatcttatcactttccattgccggatattctccgtttacatcctgcaaaatattaggatgaatcagcaaatggtaaagtgctgtgtaaaatacagttttttgagcatccgtaccaccttctacagttatacgtgataagtcatcattccatttggagcgtgcttcagcatgaatctgctcgaaattctttctagcctgttcacgatccagattcaaccgggcattttctatacttacaaaagaaactcccatttgtacttctacctgctcaccttcttctgtgtcgaaggagaaataagtaccgatgtcatctcctgctatttcttttccgtagcgagtataaagtttatactttccctggtccggatcccattcagcctcaacacccgtcatcgcacgttgtttcttccaataccctgttgcagaagggttctttttaacccgtaatacaaagtaaataggaaacacagcttgagggttataacagaatgtaccaagtagtttgactccttccacttcgctatcgcttacacgacgaagcatagcgccactctcattcgttaacccctcacccaaattcagcaggatgtggcttttcccttttgggaaagtaaaccgggcaataccgctacgcggagtagccgaaacttctgtttttacattatatttagtcagataattagaataatagcccggtgaggcctgttcatccttatacttactaccatattctttataatccacattcagttctccggtagtaggcatcaataataaagaacctaattccggacaaccgactccactcaaattcacatgagcatatccggtaaagaaacaatttgtatattcataaggcgtagaccaccatcgggcatctttatcgtatgtgttttcggaagatcccatcacattgaaaggaaccacagacatcataccattggggcaaatcgctcccggattggtcgttccgaaatttgtagttccgataaaaggatccacataatctatcaaaagacttttatccgtatttttaaggggagggctccccccttcccccgcataggcggaaagaagggaaaaagcaagtgtgtaagttaatataatacgtttcatatctttattaaatgatactcgttcgtttcgtaaaatcgataatctcttttatatatccgaaggccatacctaccacagtatctgccgcaccataataaacagcaacacgttcaccatcttgcaaagcagcacaggggaatacgacattaggaacgtcaccttgaagttcgtaaggagcagccggaccaagcagatattcacgtgtacggtaaagaactttttccggatgatctttatccaatatggcagctcccatagcgtaacggaaaccattacaagtagtgattacaccgtgatagaacagcaaccagccttcatctgtaaggaaaggaactgaacctgcaccaatcttcgtacactgccaagcgctttccgggaaaggagtcactttcattacacagcggtgttcaccccaatatttcatatccgggctatagctgatgtatatgtcgccaaacggagtatgtccattatcactgggacgactcaacatcgcatacttgccatcgatcttctgcgggaaaagtacaccattacgattgaaaggcaagaaagcattttcgcactggaaaaactccttaaagtcaaaagtataggcaataccaatcgtagggccatgataaccattacaccaagtcacccaataacggtcttcaatccatgtaacacgagggtcgtatttatattccgactcaatcatttccgtgttacctgctttaaactgaataggttcatgattgatatcccaatgaattccgtccttactaaaacctgcaaagatattcatctgtacagctttgttatcacaacggaatacgcctgcaaaaccatcctcaaaaggaacaacagcactattgaaaatactattagatgaaggaatatgataacgtccgataactggattttgtgagtaacgccacataacgtccgtacatccgacaggacgatcttcccaaggaatttgaattttattcataatcgttgattttatattatttattttttgagtcatcatacgtgaaaggtatgaaataagtaatcagaaaagctggaatagttgcgattaacacatagataaagaaattacgatatcctaataagtcactaagataaccactaaccattcccggaagcatcactcccagattcatgattcctgaagcaaatgcgtaatgtgacatttgatgtttgcctggagcaatctgttgcatcataaacaacgtcagtccgacaaaaccaaagccataaccaaaatattccattgttatacaagttccgatcagatatacattagtaggctgtgcaactgccaaaaaggtataggctacaaacggaagattaaaaatacagcagagagtaaatagtgtctttttcaatccgaacttagagacataaatacctgctaacaatgagcctaaaacgaaagcagcggaaccaaagataccatttagcgtgccgatctctgtcaacgacagtcctaagccgcctacatcccttgaagcacgtaaaaacagcggagctattttcatgataaagccttctgccaaacgatataaaataataaaacagatatagtagagaatatgctttttagtaaagaagttagcaatgactgctaccagttcgtgcccaacttctgatgctgttttcttcgttgttgacggaacctgtgtagaaggtaacatttttatatgataaataccgatcagtaccattattgccgcaattacgccgaaaataatcatccatgcagatgaatacgctcctttgttagcatctatcgaagcaccttctattgctccgaaatgctctgccaatgctcctgccatagcaactaatcctccattagcaaccaatttggctacattataaaaagcaccttgaactccgatatattttgcctgatcttccttgttcaattcagccatatatacaccatcacaagcaatatcgtgcgttgctccactaaaggcaatcactgccatcgtagagatacttatggcgaaaaagtaatcgaaaaacaaagaaaaggctactactccaaacaatacaccactcaataattctgtaatcaatacgaaaaattttttcgtccgatacatttcaagaaaaggactccacaaaaatttcagtgtccaaggcatcataatcagagaagtccagaatgcaatttgcgtatccgaaattccaagatccttaaacatgaaaacagaaaccagattaatagcaataaagggaagtcccattgcaaaataagcagtaggtacccagcaagccgggttaatagtttttcgttgagaagcagttttattctgttgcataaatcatagtatatagatgaaaaaattcatttttctgacccatctatatataatacaactaaaagggggaaactactaacgtctcccccctactttttttattttattatcacttcgtctataaaaaaccacgaaggatggcctacaccataatgccaggtcggacattctttcgttccggtgacttctactttcacataacgagtttttatcggttcggctgattcagccttgactccacggaattttacctcacccgtacgttcttccggtaaatcaatcgttctccaatgcgtataatgttcaccgtcttcagcgtatgaataaaccacctttagaggaaaaagaatccaggcccctatttgatgaagaaaatctgtttccacactatgtatctctttcgcttcgcccaaatctataacgaatgcaccatcggttccttcccaaccaatccagctatcaacaaaggttgctccaccaaacaaaccgtcaaccaatgcgttttttcctaatgccgcatattttcccgtaggaggaattagataagtaacttttgcgcccaaagccaaacttttttctttttgcggcatgtaacgttccctatacaatttgcaatagtctaccggtgaattggaacgttcattcaatgtaggaacttgaaactctttcacgcgttcctcaaaaaggtctaactttttattgatatctaccaaatctttttctgtctccgttcgtgctatttccagttctgaatactgaattggcaggcgtgcccgttgaactcgttttaagaaatctggttctgctgcaacagccttttcagccaaatcaaataaatgattataacgacgcatcaaagcaggctttagcatgccatatttatgtgatacgggtgaatcatatatccacaacctctgtccactaccgattaatgcgccttccattatctttatgtactgataaagatatggcgctgcttccccataatatccatgcagaaaatgttgcatcaatgagtctacattaacttctggattccacattaactttgacactaaataagcgcgaagttctgcaaaatctcctcccctgctccctgctatttgagagaaatgcatggtggcatgattcttttcgaaaagacggatattgtcctgtaaaatatggaaattaggaaatggagccagataattatcaaagttaataccgtaatcccacacgaaaatattattggtaatcttagaccatccttccatggctttcacaaactcttttcccgaagcattctccgtcaaagttacttcacggtcacagtcaatatcacatagcataatattcacattcggcaaaggtttcacatgtttcggaggattcatagtatatagataagccaatgtggaaaattctttatccgggaaacgggcagccaacttattcagaaaagtgattatgcttcctgataatgctccttcataatcatcaattgccttacaagcatcacacgtacaatttgtataattaccatcattctgacttacagacatgatatgcttatctggatttgctttgaaaatagaatcaacacgttgagctacaatctcaaaaacctccggattactcaaacaccactgactggcctttcccgggtggcgttttcctttgaagtaagaataatattccggatgttctttcccataaatggatgaaggcagaagcttatcaaaagtatgcacccaataaccggcagcaaacacttcattcggttcctctaaacgattccaccacttataaatagagtctgtatggatagcataacattgtgtctgacggtaacgaaagcccggattctcgactttattaatgaagggtaagttcaccgtttttgaaggggtaagagaatattcattctctccccaataatcgatacccaaatattgctccaataaagtaacaaccccatatacaacaccgttttctttaccagatatttttagaataccatcttgagtagaaatagagaatccgtcctctgttacttccgccgaagattgaccaccaatgagaatatctccttttcgaggagttttatcattttcaataggaagtgcaactcccgaaatttcagtaagaaaacgttgtaagaattgcgctgacgtcttactatttggcatcttgtcctgcacaatgatgcgagcactacttttgctatcttttacgagtgttatttgtgctgaaacagtaccacataccaccagcaaaacagataataaccaatgtttcatgtttgttagaatttaagtttatatgagcatttactagaagtacaattcaggagaataaagttctaataaattatggatactttaacacataaaaaagaggatatgcctctgcgacatatcctcctctttcaatgatttattagcctaaaacattttatttatcaaatcggatattatgttcccacctttgaagtgcaccattagatgttgcattgtgtccgtttcctgtagcatctctaaaggaagtgccatctccttcatccattggccaaagggcaatcaaattaggattcttaggattaacttcaaaatacatattgtttgcgatctccgattctgtacgagctactttccataggcgaacctgactcatagcacaattattacggaaatagctaccactatccactattttcataaaatcaaagcgtacgcttccacctttcggtgcaggaggatcaaagaaggtatcttgttttccattcctataaatggtaagtgttgttccattataaacgaaagcccaatgataccaagtgtttgcttccaaatcactggctgtttgtttttgacctcccaaagactttatctgtagataattgtaaggcctattggcatctccaaaacggatatagatttcatgatcattacttccggaagtgaaaatagcctgattatttatactataaccatccatacgtacccatgcttccaatgtccatgcatctactgtaattccccaatccgtttcaggaagtgttgttacatttccggcattaccacgtaatacaggaacagaaacattcaaaggcttagctaatacataaataaatttactttgagcttttgattttacaatattaccttttataacatttcctaatgtaagaggaatggcataagtaataccattagtcacaaaatcatccacatgaagtcgataattagcactaatttcacctgccggaattatcactgtcgcattctttggaagcatatcggctggcaagacttcatattccgtaccgctagttgcattgtattcagccagtaattcaggagagaactggatttccacttccacatcttccataactttttgagctaaacgcacaacaacgttaatgtctgcaccatcatccatggtaacagtagtagcattgtttgtaccagccgcatctgttatgtaaaggctgtttgactgtgccttgtattctgcattctcacatcctataagaaagaatgctgacaatgcaatcataagacttgataaatagatatatttcataattttcattcttataaaattcgtttaatcattattcttcgttggcagcattcatgcgttcatagaaattcctatatatgtttgtaattccctgacgcaagaaataatattccggtgaaccatcataatcgcccttaccttgtgcatagtcaaagcctacacgataaagaccacatccaccaattaactggtctatttcataaggttttccattaacagtataagtatttttatatacgtagtttgacatacccaggaatcctcctccagtattagcatacgattcaaaattctcggtagctatggttctacggacaatttcatccggagtaataatcccctgttgtatccaatcatccatatcacgcaacacgcctgtcattctataatctgccattccaccataagcttgcaatacaaaatagtctacatagtatgaaagccattctttatccatacctgttcggattccaacctcaccgtcaatcaagaaaagaaggcgtttctctggcatagggcgatctccacgatcgcggttaggatccatagcaccatgtccaaaccagtaggaaagttcctcgacaaaaatagttctctgtactttatttgaccaaagcggaccaactcccattccaccaccaggctcataatcccagtcataaccatcatatccacattcaagacaagctttataaatatcctctgcataggctttaattgcaggcctcaccttttccggatcactactggttccagcttcgtgataaatttctttatccggaaggtcgtcgcctacattttgagaaaataaggtaacaacaacctttgtgcctttcactttttgtacatattccatatcagcctttcgctccgaagttaattcaaatttcggatgcccaccccagttggaagcaatggttacagaatcaggcagacctctcaagctattttcaccggtaggagaagttcctgtccaattgtcgaaccaaacgaacacttgtggaagtcccggtgtttctttccacttgcgcaaagcagcataatattcatcagttttaattgtttgattcaaatcaacatcattaatagattccacatccgtacatccaacgaagaatatagcggcaaatgcaaatccgaatgcattttttatatgctttatattcatattctatattttatcaggttaaaatttaattctttttcgcccaccacaaatctgtagctccggtgtccggaccacctaacatagttgcaatagctgcttctacattggctgagttactagatttttccgttgtaggatatggtaaacgacgtaccatacgtttactatcaatatcaccgatataaccaacagagcttagattatctcgcgccgtaaacaattcaggataaccagttcggcgataatcacaccacgcttcgattcccaatggatagttggcaatccatttttgagtaataatcttctgaagtttattacttccgttttcccatgcaacagtaggaacatcagtaaatgaaatattattttgagagttccatcgatctgtatacccttgaggaacaactgtacttgaaagataatcaccaatctctacgccatattgattcattgaaatttgaataccttgttcatagtaactcttagctgccgctgttccacctgcaatccatccttgtaaagccgcttcagcttttaagaaataagtctctgccgcataaaaaactggcataggagaagcatctgttacagctggtttagagtaccttgcagcactaccttcaacgcttttacttgtatctttaatacccatacgtacaccacgatactctctatacgaagtcgaggtattcatatatttgctgatacgtggatcattatatccattcatgtatgcagaaagtgttgcattgatagctaaatcaccccaatctgaagcaatccaaaatgggttatatggcatagatggaaaaaaggcattatcatcattagattctattactccgccatcaatcgcttccgccatcatttgtttggcatattctgtatcttcagtattagaagcgatacgtacggccatacgaagttttaatgagttagcgtatttgatccatttgctaaaatcaccattatatatgatatcatattcggcaacaggtacttcttttccttcattttcctgaacaaatgccgaaagtacattgatactacgtgtcaaatcatcaaacatattatgatagagtgttttcacatcgtcatatgccacttggaattctccttttcccatttcagagtaagggataggaccataaatatcagctacacgaagcataacaccgacccgcagaatagatgcccacgcataaatatatccggtacctcctgtagattcttttattgtctggaaattcggataaaactctgtaaacatatctttataaggaacatctacccagtcagcactaggattgaatgttccaaaattagtaccattccaaggagcagttgttgcaaaatacccgccatactgccctaccatttgttcagtgtgttgactgttattttcctgacaggcattcaataagcgagtcatagccacaaacaacgtaccgacccgttccgtcggagtcatatcttcgggatacacgtctgttggatgtgtgtttaattcgtcaaagtttcccgtacatgaagcgaatagcagagtagtagtgaaagctgccacgcttacagtcttaattatattgaatcttttcatcattcgttgctttattagaattgtacttttatactaaatcccatgtttctcaagctaggttgcatgaaataatccacaccagtatagaatgtactggtagatgacgcaaccaattcaggatcgaacggtgccttgcaatatatcatgcccagattatttccgattaaacctaatgttacatcagcaatgttatacaaccactttttagggagtgtatattcaagactaacctcctgcaaacgaatattggttgcttcatatacatagtggtcaccttcaccagtaccagccgctactatgccgagataatccttagcggatacatttctgttattgatggttactcctccagcctgacgaagttgtgcgctatattcggaaacaccacaacgatcaaggaaagcttgtgtattagatacaaccaaaccaccaaaacgtccgcttaacaatatattcagacgtaaacctttataagtaaatgagtttctccatcctaaattaacctttggaagcaatgaaccgattttcttatattcggtttccaccatacttggcaaacctgtcttggcatccaaatagatataaccattattatcgcgtttaaagtcacggttgatatacaggtctcccatagaaccaccttctgtcaggcgtactaccggtgaagtagagcctcctaatcttgctttgtctacataaggcatttcaatcggttcccccgtaattctgtttgtaacaccatcagccaatcttttaattttattcttattataagtaaaagtaaaattactggaccaaccgaaatcacgccactcatttttatatcctaaggccatctctataccttggttctgtacactacctgcttggatgttaacagccgtatacccagaacttgccggaagaggcgcagcgaatgtttggttacgtgtatcagagttgtaataagtaatatcaaaattcaatgtattcttgaagaaacgcatattcaatcccgcctcataagatttagtaatttctggtttcaaatcagagtttggatacaaggattctgctttatattggtcaagctgatcatcataaacataacgtacctttgtcaaatatggatcataggcattacccaccgaagtgaaagaaaaacgtgcttttaagaatgagaaccattcaggcaaatcaataacttcactcaaaatgcttgaaagaccaatagaaggatagaaaaacggtttatttcctctttctgaaagagccagagaagaatcccagtcagcacgtccggtgagacttaagtagagaaaacttctccagcctatttccgcattggcaaaaactgattgtgtctgacgctttaaaccatcagcatttactttataataaccactgcgtgtaaggttttcgatggtaaaatgattagttacattgttcaagtctccatgtaaagaagtcaactccatacgaagatccttaatagaagcacccaaattggccgttacattaaattcattgaacgttttattgaagttcaccaatacatcagcatacacttgtctgtctagacggttttcttctttatatcgcccttttggaccagcaaaattaccgaccgtacctgcgtggaatttttcggtgtatttactttcggtgttatcgatgctcacacgtccttgtacatttagcccttcaatgatattatattgtagactagcagccaatttataacgtcttctatcgttctcacgattcatacgattcataatccaataaggattttgagacgaaacaccgcctaaatcaccatatggccaatactgagtatttacacccgacaaatcatcataacgttcgtatacagctacatcagaaaaatcttcgccacgtgggaacaagtacaaagaagtaagcgggttaaaatactgcccttgcgataccatattcttatcgttttgaataatatagttagcacttgtatccaaaataaacttattattcaagaagttggtagtattacggaatgagaaattatatctatcatagtcattattgggcataatgcctgttgcattagttgtggctacagagatatagctttgactcttatcattacctgtagagagagaaagtgcattggatacattgcttcctgtattaaaaaaatttgcaggatcgtatctcttatcagtttctaatccccagctcatcatttcacctgtcatattaccataagtgttttgaaacttaggcatcatcataggatcactgaatgtggtattattactataagtcacggttgtcttatcagcacgtcccttcttggtagtaattaatactactccattagctccttcatatccatacaatgcagctgcagaaggtcctgtcaacaacgacatgctctcaatatcatccggattaatgtcagctattgattcactgctcggttgtgtagccatagctccatcacccccggaagaagcacgattatacattggaataccatcaatcacatagagagcgttattattctgcgtaatagatttagcacctcgcattacaacctttacaccaccgcctggacctgaagcactagaattaatctgtacccctgctgctttaccagccagtgctcccataaagttagtactctttacagttgtaagttcatcccctttcacctgttgtacattatacgtcaatgctttctctgaccgcttgatacccaatgcagtaacaactacttcatccaatacttgcgtatcttctcctagggtaactttcaagggttgtgcgttggtaagtgtgattgcttgggagaaaatcagtttcatatactttctctagatccaattcttgttagataaatagattagatgttctatttttaagatgttaggctaaatacaattgagcaaaatcaatgaatgaaagaaaaagttagtaagattgcacatgaatatgcagtaattaaattgtttttattcatatatgcggtatgaatattcgataaaagacgttttttcaggaatgttccacaccgagaatcacttcgtttctcggtgtggaacattttgattctttaaatggaacctaacaaatcatttaaagaataataataacttgttttatagtagttgttttcttctagttagtgccgataatacaaagaacggaatcttttcatttgattaatattgtcaatattagatactattctatcactacgcgggcgataaaaagaataatttgcaataatattatccttttttatttgaattacgtttggctaaagtggaaatccctgcggttttcaaaacactcctgataacaagatgcatattctaaattataggtaatctgaatatgcgttttttaatattatactcacttttatcctatatcaattattggtccatttttcattgtacatacaatttgcatgcaaatgtattaatctagagattaaagttagtcaataattgagcattccttattctttcctctttttcaaagtatgctaaatagtgctcggttacagataagttagagtgtcccaagctttcagaaatatatgaggttttcgcacctccacgttttaatactgtagcaaaagaatgccttgccgtgtaagtcgtcaactgaaaaattccaatgtcttgggctatttttttaagtcttctgttacatttggttataatacgccgtaccaatctaatcttttcaaaggcatcttcagatcctctagcatatttaaaaatatacgtttgcgggcttaatcttggattaccccatttttgaataatattccacatttcaggagtaatgattgcatgtatctctttgttatgtttggtagttcgagatgtcttagagcgtacaaagcatatttctccatccataatatttgaatactgaagaaataataaatccataaaattaatgccattacataaataagaaaacacccagagatccctaaattcttctatatcttttgtttcacattgataagacattactttttttatttcagaaagagtaagtgctaatttacgtccacacccttcagaaatttcatatttattctttccaaaaggaaaagatgattcttttatgataccatcatgtacagcacgatttaagacacactttaaagctcggaaataaatacttatgcttgaatagcttttaccttctgatatccaaaatttttcacaacgtttaagccaatcaattgtaatgttttccaaaggtatagtggaacctccgaaatcttctaaactttttaaagcactttgataatttaagtaagtgtttgcttgttcattggcttccagttctttcatttttaagcgaaaagcactgcgcaaagtcatatcattcatctgccttcctaacctggcgcttaatgtttcaatactaaattctcctttttgtatcagttcgttaacttgttgcttaatagttgaaaaactactctctatatctgatcgaatttctgccaataaccggctttttacttttaataaccttgcccaatcttcttttgacaattctttcccagttgagtaatatttttgctttcttctatataccacttgaactttaacaggaaattgtccactcttttttgctcttctggtatctaatatggttaaaaccgaaattccatcttttgaatatttgaacataaaatgaatatttatatctatacaataggtaaagcatacatatattgtatgcaaaatgtatgcaaatgtaataaatcagtctgattttaataagtacataagattctatttatcaaatatttgagtatttatttttcaaataagaatctacctattctatttttttgataaaaaaaatcttatcttcgtttagtaaggttacaacataaaatgtattactattgaataagcgcttatggaatttattttaagtgtaacctttaaatttattaattatgagaaacagagatacatgaaacctttgtgtgaaaacggtaatcacatttaccgcttctaattacaaactctctaaaaactatttctaattaaaaagaataagatgaaagaaattataaaacacaagttctcacacttgttattcttccttttgttggtttcgtgttttgcttcagcttatgggcaagaacgaacgatcactcttaatctatcgaaagtacccttgaacactgctttgaaagaaattgagaaacaaacttcaatgtcagtagtctataacacaaatgatgtcgatataaatcgtgtcatatctatcaaggtaacaaaagaatctttgaataatgtaatgaatcagttattcagaggagttaatgtcagtttttcaatagtagataatcatattgtactttctgcgaagagtaataaagaagagcagcagaaaaaaacaccaattactgcaagtggtactgttactgattcaaaaggagaaccattgattggagttagtattttggtaaaaggaacttcaaatggtactatcactgatatggatggaaatttcaaaatacaagcagctaaaggtgatgtacttgaagtatcctatatcggttatgcctcccaaacaatcacgcttgccaatgcccaacctcttaaaataaccttaggagaagatacacaagtattggatgaagttgttgttactgcattaggtatcaagcgtgcaaccaaggcgttaagttataatgtacaagaggtaaaaggtgatgaattgacagctgttaaggacgccaattttatgaattcattatcaggaaaggttgccggtgttcaaattaatagtggtgcaaccggtgctggtggtgccacacgtgttgttatgcgtggtatgaaatctctgactaaagataacaatgcattgtatgtaattgatggtgtacctatttttaatacaggaaaaagcggtggcgaaggattatttggagagatgggaggatcagatgctgttgctgacttaaatccggatgatattgctagtattagtatgatgaccggtccttctgcggcagcattatatggttctgctgcggcaaacggtgttgttttaattactactaaaaaaggccaaacagagaaaactaccataacagtatccaacagtactactttctctaaagcatatattatgccggatatgcagaaccgttatggtacaagttccggattattcagctggggagaattgacaaaccgtcgatataacccatctgacttctttgaaacaggctccaatgttatcaattcggtagcattatctacaggaaataccaaaaaccagacctatctttctgcttctacaactaactccggtggaattcttccgaataactcctataaccgttataattttacggcacgtaataccacccatttcctgaatgataaacttactctggatatcggtgcacaatatatcgttcagaacaacaaaaacatggtttctcaaggacagtattataatcctctcccatcactgtatctattccctcgtggagacaactttgacgaaattcgtttgtatgaacgttataatactaactacggctatatggaacaatattggccttatggtgatgcaagtttgtcattacaaaatccatattggatacaaaatcgcatcaaccgtacttccaacaagaaacgttatatgatgaacgcttctttgaaatggcaggctacagattggctcaatgttgtcggtcgcgtcaatctggacaactccgactaccggaataaaaacgaaaaatctgcttctacattaacaacattctgtggtgtaagcggtggttttgaagatgccatgcgtcaggaacgttctttatatgccgatttcctggctaatataaataaaacatttggtgtttttcatttaacagccaatgttggtgcttccatatatcatacttcaatggatcagttatatattgcaggtgacctggttattcccaacttcttccagatcaacaatattaatttctccgccaactataaaccggaccctaccggatatgaagatgaaattcaaagtatttttgccagtgctgaattaagttggaaaaatcaactgtatctaactgtaaccggacgtaatgactgggattcaaaactcgcattctccaaacaaaaatcgttcttttatccgtcagtcggtttatcggctttattatcagaaatggttaaactaccagaggtgatttcttatgctaaaatacgcggttcgtatacagtggtagcctcttctttcgatcgtttccttactaatccgggttacgaatacaacagccagacacataactgggcgaatccgaccgtatatccgatggacaatatgaaacctgaaaagactaaatcctgggaaatcggtttgaacttgaaattctggggaaatcgttttaatttagacgctacttactatcgttctaatacactgaaccaaacatttaaggtagatatcccctcttcttccggatataaacaagcgattgtacaagctggtaacgtgcaaaatcagggtattgaattagctttaggattcagtgataaatgggcaggattcggatggtcttctaatgcaaccttcactctaaaccgtaacaaggtgaaacgactggcaagcggtagcgtgaatcccgtgacaggagaagctatccaaatggatgaaatgaatgtgggttggttaggtaaagagaatgtagctcctcgcgtcatcctgacagaaggaggttccatgactgatatctatgtatacaaccaactgacaaaagacaataacggtaatataaaagtcgatcagaatggtaatctgggtatcacttcatcaaacactccggtaaaagtaggtaatctggatgctgatttcaacctcggatggaccaatcatttcacttataaaggaattgatttaggagttgtattatcagcccgtgtaggcggattagcttattcggctactcaaggtattttagattattatggagtatccgaaacatctgcaacagctcgtgataatggtggtatacctattaataacggcaaagttaacgcccaaaagtattaccagactattggtacgggtgaaggtggctacggtcgttattatctatatagtgcaaccaatgtacgtttgcaggaattgagtctaaactatacacttcctaaaagatggtttaaaaatgtggcgaatgttactttgggtattgtaggacgtaatttatggatgatttattgtaaagccccatttgacccggaattgtctgcctctacctccagtaactattatatgaatgtagactactttatgcaacccagcttgcgtaacttcggttttaatgtgaaagttcaattttaaaagaaaaagctaatgttatgagaaaatatttaagaaatatcacagtcggtgccgctctgttgttactggcaggaagttgtaccgataaatttgaggagtataatacgaatcaatatcaaattcatgatgcagaccctgcgactttgatgaaatctatgattgaaacaattgtgaatattcagcagaatgactctcaaatgcaagatcagatggtgggacagttaggtggctatctatgctgttctaacacatggagtggtacaaacttcagcacattcaatcagagtgatgcctggaatgctaccccctggaacactccgtttgaaaaaatatatggaaactttttccaaatacaagaagcgacaaattctacgggacattattatgcttttgcgtgtatgatacgtgcaataacaatgcttcgcgttgcggattgttatggaccgatgccttacagccaagtaaagaagggtaatttctatgtatcttatgatacccaggaacaggtctataccagtatattaagtgatttagccaatgcagccgatgttttgtacaactattatgtagaaacaaatggtaatgccccattgggagccaatgatccggtttttgatggaaattattcaggttgggctaagctagccaattcaatgcgcttacgtgttgcaatgcgaatcagcggaacatggcctggcattgctcaagaggcagctgaagcagcagtaacacataaagccggattgattgaaagtaattcggataatgctatgctttcttgtggcacacagagtaatccatatcaactggcagctgtaagttggggtgatctgcgtgtgaatgcaaatattgtagattatatgaatgcatatggcgatccacgtatgccgaagttctttaataagtctacccttgccgggaaaacagataaatatgtaggtatgcgtacaggagatgctgattttaaaaaggcagatgcagcaggattctctattcctgcatatacggcaacttctaaattaatggttttctgtgctgcagagacagcgtttttacgtgcagaaggaaaattgcgtggttggaatgtcggttctaaaacagcaaaagcctattacgaagatggtattaatttgtcaatggaacaatatcaggtttcagccactgaatacttgaagattgacgaagctcctgtcgtatcacatgaaagtgatgctgtgcaaaatgctactgctacaattaccaatacagtgagtgtgatgtgggatgacagtgaggctgataacgtaaatggaaaaaatttccaacgtgtcattactcaaaaatggatcgccaattatccattaggattggaagcatgggctgaatatcgccgtacaggttatccggaactttatccttgtatcgacaatctatcagattgtggagtgagtagccaacgcggtatgcgtcgtctaagcttcccttatacagaggcacaaaacaataaagccaattatgatctgggagtagcagaactaggcggtgctgataacgaagctactgacttaaagtgggctaaaaagaactaatttatataatgcataaaaaggacttttatgaagaaaatttatttattatacattgtactcatatcactggcaacgacctcattgatcggttgcagtgactggacggagtcggaagcaaaaacttttcccgaatcgatcgtatcggatgaatattatgcggccttgcgtgcctataagcagacagatcaccaagttgcctttggctggtttggtggctggagtggtgaaggtgcttttatgaaaagctctctagctggtattccggatagcgtagatattgtttctatttgggataatggaacgaatctttctgaagctcaacgtaaggatatggctttttgccagaacatgaaaggtacaaaaattatatactgttcaattatcggtggtgtaggagacaaactgactccacagaatatactggataattgggaagaaatgggatacaatagtaaacaggaagctattaatgatttttggggatacccgtcagacgaaagtaatatagaagcagtagaaacttcaatccgcaaatatgcaaaagcgattgtagatactttaaatctatatggttatgatggatttgatatagattacgaacctgtggccggaccctacaccggaaatatagtcaattcagatgaacatttgtttttctttattgacgaattaggcaagtatctgggaccgaaatccggaacaggaagactattggtcattgatggtgaacctcaaagaattactaccaagcctgaaattggaacttactttgattatttcattatccaagcctacaaaccgggaagtgattcaaatttagacaaacgacttattgatggtaaggtttggggaccagggttggtagaaacttttggcggagtaatgaccgaagaggtaattacgagaagaactataatgactgaaaacttcgaagcgaccgatgctgcgatggatggcggttatccctataccgaccgttatgggaatagtatgaaatctttggaaggcatggcacgttggcagcctagaaatggtttccgtaaaggtggggtaggaacttatcacatggaagcagaatttggtacttcaccggaatataagaatatacgtcgtgccatccagattatgaatccatcatcacattcattacttaaaaattaatgtaaactatgaaacgtatgaattatataagaactttatacttctctgcaattatagcaggcttaggaagtatggtaagttgcggagatgcgaaatatgatgctttagacacacatgcttatattgaagaagcactttcaagtacaagccaaaaagtaactgtacaagcctctggcgaaagttttactactctaaatgtgcatcttagcaatctttcttctacagacaaccattataagttggtcacggaccaatctgtattggatgcttataaccacattaatggaaccggatatataatgttgcccgaaggatattatacactaccggaaactattacagtgaaagcaggacaatatgcagccgatgccctctccatcgctttgaaagctttcagtcaggaaatgatgaaatcgggagaatcatatgcactgcctgtaaaactagtattgcaagatggaagtatttcaccgatggaaaataccggaacctttgttattttggcagaaagtattatcgaattttcagctccaatgtttgttggcgctcctagtttaaaagctaataaattcacagaatctcccgaaacgtattcacaatatacgatagaggttcgttttcaggtagccaacacagctgaccgtgaccgtgcagtctttaaaaacggaggagatgatgcaaacttcatccttttacgttttgaggatcctcaaagtgacaatgaaaattataaggcacattcattagtacagattgtaggacgtaaccggctttatttgaatccaagtaattctttcaagccaaacgaatggcaacatttagcattggtctgtgatggttccaactatcgactttacataaacggagttgattcgggtgtgttgagtataccaacaggagcaacaactttctctgatgtaaattggttctgcttaggtgatgattcttatagtagatggggaaactgtaaaattttgatgagtgaagcacgtatttggtccgtagttcgttccgcttctcaaattcagaataacatgacgcaagttagccctaaatctgtaggtttggaagcttattggcgattcaatgaaggacaaggtaatgtgttcgaagatgcaaccggtaaaggtcatactttgacaacttctgctactcctacctggattgacggtattttatctacagataaggctactgaatggaaatagtaaaaattaaattgtatatgtatatgaaaaatatatttcaatcactatcaatagcaactctactcggcttgtttgtcccattcatttcgtcctgtagtgatgatgaagaagtttttaacgagtggaatgctacgtatgtgtctctacagagaaatgactatttatcggggaatgtaaaaaagttcaatctgactcatgatgcgaatggaatcggaggagatgaaattaagatggcttttactgtaaaaacacagaaagcagtctctacagatatggttatcgcattaagtgcaaaaagtgaaacagaagggcttgatgcaagccagatcgttttaagttcctcacaggttactctcaaagaaggacagatgacttctgaagaaatcactgcaacggtcgatccaacgatattcgccagtatcatggaaaaaacaagtttctctttcagtgtatcaatcagtaatgtaactaccaatgataagaacactgtcattagcagtaatttaagtatcttacctgtcatcattaataaagctgcctactgtaatctaaaaagtggtactcctagcaatagccaacttatcagtaatcgtgtaggttggattgttaatgtggaagaaggagtagacggcgcgcctaataatttaattgatggcaagactggaactgacgttgctctaaataataaaggcttctggttcaccgttgatttaggagaaactaaggttttaacaggcatcaaaacgaatcactggggaaatgcatatgctcctagagaagtggaaatattacagtctgaaaatggtatgacatggaaatcattaagttcattagcaatacccggtagtagtacacaaaacatcacgttcatctctcctattactacgcgatatctaaaatatcagattatcactatctctacaaacggtcgtacggatgttacagaatttaatgtttacgaacccaaaagtgagtaagtatttatgaatagataactataaaaatatagaatagaggctatcaaacaggccttaagttcataaaatcaccctcattacaatgaactgcaccccaaaagttgaacacaaaacttaaggagtgcagttcagtcatgtagtgagggtgatttctcgtgttaaagactatctaatcaaatcccattccaatcagtttgccactacatatatgtgaaatgcccccagaaagttatgtatctaacttttgggagcacttcacatctttatataacgaacaaaccttaatctgtcaagatctaattagacagccttttagaaacactaacctatctcttatttcttcatcactcggacaatccgtccgtctttcttataagaaaaatgatttgtatgcatcaaaacattcagtatttcatcagcagtgctatcagtagagaattcaccggtaaaccgttctgatttcaaagcatcatccttatagataaatttaatatcatacaacttctccataatattggttatttccaataaagaatgttgcttgaattccaacttacctttcatccacaggagcacatccgtaggctggttatattcaatcaactctgcctgataagtatccgtattcacattcaatgtctgtcccggtttcagtaaatagccattctcttccgttcgtggagaatccacccgcaccaaaccttgaagcaaggtagtcactaccctattctcttcttcacgcgcacgcacattaaatttcgtaccaagcacacaagtcttgatttgtttactgtttacgataaatggagcatgtttatcatgggaaacctcgaaataagcttcacccgacaaatcgatttggcgatccgaactccagaaagaattatgataaactaatttagaagatgcattcagccataccctactaccatccggcagtacagtctgtgctctctgtccggcagcagttatcacctcataatctgaaagtttattggaaagtaatccccaggcaattccaccggcaaaaacaagtccggtaagaaaagcagcagccacagtagcataacgcccccaacggattgagatatttttccgtttagtatttctctccttttctctgatagccgacttaaatttatctaatgacgcctctgtatctacagcattcatcaccgctatacgttcacctacaaaaagagtataataaagttgctctaaagttttccgattccccggttcttcctcgcaccaagtttccacccgggcagcttcttcatcattacattcaccctgcagataattcaacaagatagtttcatccatgctcatttgaccttttacaataaaaaaactataaaacctttgtagtaatacagttgtgagtacaaatatactaaacgaaaaaagaaaaaaatattttttctcgcatttttatttcatttatctacttctttcattatttttgtcttacataaattaaaagagaatgtcacaatctccgatatatttggatattaataataataagtccgttattactgccctaaaagcaggagaagaaaaagtttttgacgtcgtctacagacattatttccgtaggctatgtgctttttgttctcaatacgtaagtgagcaggaagaaatagaggagattgtgcaggaaacaatgatgtggctgtgggaaaaccgttgtactctgatggaagatctgacactcaaaactcttctttttacgattgtcaagaacaaagccctcaaccgtctttcccattttgagattaaacgaaaagtacatcaggaaatcgtagataaatatgatagtgagctcaataacccggacttctatttgagtgatgagcttttccgtctatatgaagaagcattaaaaagacttccgaaagaatatctcgaagcctacgagatgaaccgtaatcaacatctgacgcataaagaaattgccgagaaactgaatgtatctccacaaacgattaattacagaattggacaagctttaaagctattacgagtagctttaaaagactatctacctttattcatacttattttcggacctaattttttcgaacaatcatgaaatcaaacttcgtatttagtagttcaagcctgtttatcggactttttcttttcttcttcacagaaaatgtatattcacaagaatctgctgacaactggactcttaaacaagcccgccaatggacacagaaacaagaatgggcgaacgggctgaaggcaatgcctcataagacaaccgattatcaggagtttgcctcacaatatcacaagaacaagaaagtgtgggacaagactttccaatggctagctacccacgacctcgtaaatatgcctgccggacgatacgaagtagatggtgaacattgctacatcaatgtgcaggatgcaacaacacaagatgtcagtaaacgtaaaattgaagcacaccgccacggcatcgatttgcaatatgtagtaaaaggtaccgaacgtttcggaattacttcagccgaatatgcggagcctatcaccgaatataaaccggatgttactttctacaaagccaaaaaaataaaatatgtagattccactccggacacattcttcatgttcttccctaaaaacttccatcaggcattagtaaaagccgggaaagaaccggaagagatacgagtaatcgttgctaaaatcgaatatatcccttaaacaaaaacatgagtgaacttttagtctataaagcctctgcaggttcgggtaaaacatttaccctggccgtggaatacatcaaactattaattttcaatccccgtgcctaccggcaaattctcgctgtaacctttaccaataaggcaacagcagaaatgaaggaacgtattcttagtcagcttttcggcatacagataggtgataaagattcggaagcctatctcaaccgtatcaaagaagagactggaaaaaccgaacaggagatacgggaagcggcaggtgtcgcccttaactatatgctgcatgattacagccggttcagggtagagactattgactcatttttccaatctgtcatgcgtaatctcgcacgggaactggaacttagcccgaatctgaatatcgagttaaacaataccgaagttcttagtgacgccgtagatagtatgatcgagaagttaggtcccacttcccctgtcctcgcatggttattagactatatcaacgaacgaattgccgatgataaacgatggaatgtatcagacgaagttaaaagtttcggacgcaatattttcgatgaaggctatattgaaaaaggagaaggacttcggcaacgactgcgtaatccgaacaccatcaaagaataccgcaaacaactgaaagctctggaaacggaaatactggagcaaatgaaaggattctacgaccaattcgaaggagaactggatggtcacgcattaactgctgatgatctgaaaaacggttcacggggaatcggaagttatttccgtaaactgaataatggcgttttaagcaatgatatccgtaatgccacagtagagaaatgtctggaagatgccaaaaattgggcaaccaagacttctccccgttatgcggatatcatcaacctggctaattccagccttatacaaattctggaagatgctgaaaagttgcgttccaagaataatttgttactgaatagttgccggttatccttgcaacatctcaataaagtgcaacttctcgccaatatcgacgaagaagtacgtcagttgaaccacgacaacaaccgttttctgttgtcagacacgaacgccctgcttcaccaactggtgaaagacggtgactcctcttttgtattcgaaaagatagggacaaatatccataatgtcatgatagacgagtttcaggataccagccgaatgcaatggggcaacttcaaactgcttttgctcgaagggctgtctcaaggagcagacagtttgattgtaggagacgtcaaacagtccatttatcgttggcggaatggtgattggggaattctcaacagcctgaatgaccacatcgagcatttcccgatccgcgtcaagacgttagccaccaatcggagaagtgaaacgaatgtcatccggtttaacaatcgaatcttcacagctgctgccaactatctgaacggagtgtataaacagcaattaggcaaagattgtgaggatttgcagaaagcctatgccgacgttgtgcaggaatctccccgaagtacagaaaaaggatacgttaaagtctcttttctcgaacccgacgaagaacatgactataccgagcagacacttattagcctgggagcagaagtggaaaacctcctcgcctccggagtacagcttaatgacatcgccatcttagtacgaaaaaataaaagtattccccgtattgccgattactttgataaggagctacactacaaagtggtatcagacgaagcctttcgccttgacgcctctcttgccatttgtatgatgctggacgccttgcgatttctttccgacgaaaacaataaaatagcacgtgcccagctggccatagcctatcaaaacgaagttttacaaaaaggattggattggaataccctcctactcctccctgccgagaattatcttcccgccgcttttcttgaaaaaataaaagaattaaggctaatgcctctctatgagctattggaagagcttttcagtatattcgagatgaatcttatcaaagaccaggatgcctacttattcgcattcttcgatgctgtcactgactatctacaaagtaactcttccgaactcgacggattcatccggtattggaatgaaacgttatgcagtaaaacaattccaagcggagaagtagaaggaatccggattttctccatacacaaatccaaaggattggaattccataccgtgctcctccctttctgcgactggaaactggagaatgagaccaataaccaacttgtatggtgtaccccgcaagcagcaccattcgacgcgttggatattctccctatcaactactccacccaaatggcagaatctatttatggaaacgactacctgcaagagcgtctccaactttgggtagataacctcaatctgttatacgttgcttttacccgtgcaggaaaaaaccttattatctggagcagaaaaaatcaaaaaggtaccatgtccgaactgttggcaaacactctcccaatcgtagctaaggaagaaggtattgattgggaagaagactgttacgaacaaggacaactatgtccgtcagaaaaagaaagaacaaagacatcgaccaacaagctaacccagaaaccggaaaagctccctatccggatggaatccatgcgccatggtattgagtttcgtcagtccaaccgttcagcggacttcatccagggaattgaggaagaagactcggacgaccgctttatcaaccgcgggcgtatgttacacaccctgttttctgttatcgaaacagcagaagatatagatccggccatcgaacgacttatttttgaaggagtgatcagaaatgatgagaaagaaaaagtagcccgcgaagttgcaacgaaagctttttcttctcctgaaattcaagattggtattccggaaagtggacattatttaatgagtgtgccattatctataaagaaaaaggagtgctacaaacccgtcgcccggaccgcgtaatgatgaaagacaaccaggttgttgtagttgatttcaaatttggtaaggaaaaccccaaatataataaacaggtaaaaggctacatgcagctacttaccaagatgggatataagaatatcaccggttacttgtggtatgtggatgaagaaaaaatagaaaaagtatgaaagcagttcccctcatcggcatcgcccgccatcgactaacaattgacggtgaaggagttacaacattagttgcttttcacggttgtccgttgcgttgcaaatactgtctcaacccgacatctttgcaacctaacggtgtttgggagagctataattgtaaccagctctacgaggaagtacgcaaagatgaactctactttttggcgagttgcggcggagtcacatttggcggtggagaacctttattacaaagcgaatttatcaggcaattccgccaactctgtggcccggaatggagaatcactgtcgaaacctctctcaatgttccgcaacagaatgtagaagaactgatttctattatagataattacatagtcgacatcaaagatatgaataatgacatctatcagcgatataccggaaagaataatgaaaacgtcttaggtaatttacgatatttaatcgggaaagacaaagccaagcaaatcgttattcggacaccactcatcccctcctataatacggagaaggatattgaccaaagcatagaacttctgaaagaaatgggaattacccagttcgaccggttcacttataaaacccctaatgattaatgacatggtacgaggaaaacaaacttgcaaaattttaaaagagattcgtcggcagatagccgaagcgaatgatattgaattcatcacctctgaatgtcagtatcagggagactgtttgggcacttgtcccaaatgcgaagcggaagttcgttatttggagcaacagcttgagcgaaaacagatagcgggaaaagcaatcacagtattaggcatatctgcagggctgatagccatgactccaatgacttcatgcactaattcggctaataaaggaatgaataaagaagtgtctagtgatacaacttcctatgaaaatctcattatgggagagcctgtccccactccggcagaagacaccatcattgcctccataaaagatgtaccacctcccccaccaccagcgccaacacccgatgatatgctaggaggagagatagtagttggatttgttgcccccgatatatcaaatacttcactgtcggctagtgatacactggaagtagctccggttatgccggaattcccgggaggtcaacaagcattaatgcaattccttagaaaaaaaataaagtatccgacagtcgctcaaggagagatgggaccacagggacgtgttattatccggtttgtcgttgataaggaaggaaatgtagtcaaccccaaagttgtacgcagcgtagatccttacttggataaagaagcattgcgtatcatcaatcaaatgcccaaatggaagccgggagaactggaagatggtactaaagtagccgtctatttcaccgttccggttatgttccgggcacaataaatatatgaattagaaaaacttaatcaatatgcaatcatttctccaactagtcgctcacgatttatatgccaaaataggaaatgacctgtcacgtacagcactcattttccccaataaacgtgctaacttgtttttcaatgaatatttggcaggagaatccgatcaaccgatctggtcaccagccgccatgagtatcagcgacctgtttcagaaactatcagtacaaaaaagcggtgaccctattagattggtttgtgagctttataaagtattcaaagaggaaacacagagccaggaaacattggatgatttctacttctggggagagttgttgattagtgattttgatgatgtggataagaatatggttgatgccgacaaactattcagtaatctgcaagatctgaaaaacctgatggacgattatgaattcctcgacaaagaacaggaagaagccattcaacagttttttcagaatttctccattgaaagacgaaccgaactcaaagagaaatttatttccctttgggacaaactaggcactatctaccatcattaccgggaaaacctgacagagctaggcatcgcatacgaaggcatgctctaccggaatgtgattgaacaactcgataccgatcaactcaaatacgacaaatacatatttgtcggtttcaatgtactgaacaaagtagaaaacgaatttttcagaaaactgaaagatgcaggcaaagcactcttttattgggactacgatattttctacacccaacaaatcagaaaacatgaagccggagaatttctgaaacgtaatctgggggaatttccgaacgaactcccggaaagctttttcgataccttcaaagaaccgaaaaaaatacgttatatttccgcttccaccgagaatgcacaagcgcgtttcctccccgaatggatcaaaatgattacggacaatcattcacaaatcgctgaagaaaaggaaaaagaaaatgccgtagtactttgtaatgaagccttgctgcttcccgtacttcattccattccgcaggaagtgaagaatgtcaatatcaccatgggattcccattggctcaaactcctgtttacagttttatcaatgccgctatggagctacaaaccaacggttaccgctccgataccggccgattcacttacgaggcggtatcagccatattgaaacatccctatacccagcaaatctcatcccatgccggtccactggaacgcgaactaaccaaaacaaaccgcttctatccacttccatcggaactgaagcaagatgatttcctggctaccctattcactccccgtaatggcattaaagagctatgcgattatctgattgaattaatcaaagatatttcaaccatttatcgcaaagaaggggaatacaatgatattttcaatcaactttatagagaatccctcttccaaagccataccaaaatcaaccgtctctacagtttgattgaaagcggagaactaagtatacgcaccgacaccctgaaacgtctgataaccaaagtattgacagcttccaatattcctttccacggagaacccgctatcggaatgcaagtcatgggagtactggaaacacgtaatctggacttccggaatctcatcatattatctctcaacgaaggacaactccccaaatccggaggagaatcttcttttattccctataacctccggaaagcttttggcatgaccactatcgaacataagaatgcagtgtatgcctactatttctatcgcctgatacaacgggcagaaaatatcactctgctctacaatacttcctcggacggtctcaaccgtggagaagagtcccgcttcatgttgcaattactcgtggaaggtccgcatgatatcactcgtgagtatctggaagccggacaatctccgcaaagcatccaaaagatacagatagaaaaaacacctgaagtactaagacgaatttatcgtacttacgatagcactaatccttcatcggtaattctctctccttccgccctcaatgcttatcttgattgccgattgagattctattaccgctacgtagcgagattaaaaacaccggatgaagtcagtgcagaaattgattcagctttgtttggaaccattttccatctctctgcccaattagcatacaccgatctgactgctaatggaaaaatgatacagaaagaagatattgaacgcttattacgtaatgaagtaaagttgcaaagctatgtcgaccaagccttcaaggaagaattattcaaggtcgctcccgaagaaaagcccgaatataacggcatacagcttatcaactccaaagtaattgtttcctatctgaaacaattactgcgcaacgaccttcaatatactccttttgaaatggtcgccatggaaaaggaggtttcagaagagataaccatacagacaggacaagggccgttcactctccgcctgggtgggacaatcgaccgtatggatgctaaagaaagtaccctgcggattgttgactacaaaacaggaggaagccctaagattccagccaacatcgagcaactgtttacgccatcggaaacacgcccgaactatatcttccagactttcctgtatgccgctatcatgagccggaagcaatcattaatggtagctcctgccctgctctacattcaccgggcagcatcggaaagctattcgcctgttattgaaatgggagaaccccgcaaaccgaaaataccagtaaacaacttcgccttttttgaagatgaattccgtgaacgcttacaggcattactagaagagatctttaatgaaaaagaacctttcacgcagacagaggacactaaaaagtgttcgtattgcgattttaaagctatctgcaagcgatagattaaattaaaaatccaggcacggattacgcaaatcacggtttttccaattatcttaaaccgtgtaattccgtgtaatccgtgcctgaataaaatataaagaagtttcaacgcatcctttaacagagacaaaaacgcattgaatcaattatttttcgagcaatggaattgagaaactaaatgtagatccgtctcctttctttgaagtaaaccacagcttaccgccattcttgacaacaaagtcctgacacaataataatccgagtcccgaaccttcctcattgtttgtaccgaaggtactgaaatgagtatcagtgtgcaacaacttcttctgattttcgtcatcaataccgcaaccactatctttcacacttacgattgccataccatcttcctctgtcagtgacaccactacttccgaaccttcattgctaaacttgatcgcattgctgattaaattacgaatcactgttttaatcatgtcaatatcagcacgaacagccacattctctacaggcacatcttgtactatcttaatatttttcaggctggccaccatcgtaaagatttcacttacgccctctacgacttccaccatattaatatcctgataaaccactttcagcttaccaatctggctcttcgtccatttcagcagattatcaagcaatgagaatacatcttctgttgtctgattagccatcgttagcaattcatacatctcatcaccgattgtatcactcggcaaattcagaatcagcatattcaataccatcttgatagatcccattggtgaacgcaagtcatgtgcaatcacagaatagagtttgtcgcgtcccatgatcgtcttacgtaactcttccgtttgtgcaacaatgattcttttcgctgcaaccaacgaaatctggtgcgtcacacgaataatcaattcttctttattgaatggctttgaaataaagtcattaccacccacctgaaatccttttacaatatccgccgtactgtttagagcagtcaggaagataatgggaatttcagccatttcggggtccgctttcatttgttgagctacctcaaagccactgatatccggcatcattacatccagtaatacaagatccggattttccttcttcacttgttccaacgcctgcgttccattaccggcagtcacaattttgaatttttcgttagtcaaaagtacctttaataaaaggacgtttgaaatcacatcgtccacaataaggactttatattcagaaggattaatttccatattcataattttctttttttatgcttcagacatttttaaaatattcaatcatacgcttcagcccctcttcaagttcaacagtaggctgccagcccaatttctctttagccaatgtaatatccggttggcgttgcttcggatcatcatccggtaaagacttaaatacaatcttcgaagatgaaccggtcatactaataatcctttccgccaattccaataccggaaattcattcggattccccaggtttataggacctgtaaactcgtcctccgtattcatcattcttatcattccttcaatcaaatcatcaatatactggaagctgcgtgtctgcttcccatcaccatatatcgttatatcttcattattcaacgcttgaagaataaaattagaaacaacccgtccatcattcggcaacattcgcggaccatacgtattaaaaatacggataatcttcacacgcacattgttctgacggtgataatccataaataacgtttctgcacaacgctttccctcatcatagcaagaccggtatcccaccggattcacatttccccaatagctttccggttgcggatgaacgattggatctccatatacctcgctcgtagaagcttgcagaatcttggcatccagtctcattgccaatcccagcatattaatagctcccatcacagatgttttggcagtttgaatcgggtcatgttgataatgaatgggagatgccggacaggccaaattatagatttcatctacttcagccgaataaggataagtgacatcatgcctcaccacctcaaaatgatgattatccatcaagtgaatgatattatctttcgaacccgtaaaaaaattatccaggcatatcacgtcgtgaccttcgtttataagccgtgtacagagatgagagcctataaaaccggctccgccacttaccaatattcttttcattctaaatatttctattgtttactaaagagacgctgtctcttcgttttgtttatggtcacaaatgtaaccgatttgcttaaaataaacaattttcggagaggatattttaaaaaaaagaagatttaaatagtttcaatttccgaaacaacttgccactgacaaatgtttataatagaaaagtattatttattagaactattatgatgacaaataatccaaatgcaaacctcatagaagcgatgaaggaaaaacttccgctcaaagggcaactggcagatatgttaatggacacgctatacataggaaaagaggcagtatatagaagattgcgcggtgaagtacctttcaccttgcaagagtcggctcttatttcaagaaaactgggtatatcgctagacaagattataggactgagtttcaaatcgaacgccatgttcaatataaacattgtagattatgacgacccgttcgagagttactacaatatccttgaaaaatatgtctcgctgattaatacgatgccggatgacccgaattctgtaatgggaacttctgccaacattattccccagactctctatctgaaacatgagcttctggcaaaattccgtttattcaaatggatgtaccagaataaatatattgattgcaagagtttcgaagagttggatattccatcgaaactggtcaatatccaaaaagactatgtagcaatgacacgtcatatccactccatagactatatatgggataatatgattttccagcatctcatcaacgatatccaatacttcgccagcatccatctcatttccgacgaaacgaaagaagaaatcaaaaaagaattattcttattggcagacgaactggaagaactggctatcaacggtaaaacagccgacggcaatcgtgtacgcatctatgtgtcgaatatcaacttcgaggcaacatatagttatgtagacaccaataatctgcaactgagcctcatacgtatttattctatcaactccattaccacgatggacaacgaaattttctgtaccttgaaagaatggattcaatctctgaaaaagttctccactttgatatccgaaagcggtgaaatgcagcgtattcaattcttcaagcaacagcgagaaattattgacgctctttaattttattttcgcagattagaacttcaaaaaaaattaagttccaataaatgaaagtagataagaatcttatctactttttttcattccctgttcccatcctacccacttgattcccaatcagaaaaagacctgcacattcatctctgttttaccacacaaatctttcaaacacaagacgtaattttgcatagaatgtatcacagagattattaacattaaaattaaaggaacaaacaatgaaaaacggtattctaaacgaattaatatctacaatgagggagcgaattcctcaagatatgaatctggccaatactttggctgacattttatgcatgggaaaggaagctgtctatcgcagattgaggggtgaggtgtcttttacaatagacgaagtagcgctgctttctcaaaaactcggtatttctatcgaccagattgtcggtagccatgtatctaataaagttactttcgacctgaacttgcttcatgcttccaatgcattggaaagttattacgaaataatcaaccgttatctgcaaattttcgactatgtaaaaacagataatacgacggaggtgtatactgcatccaattccctgccctttacactttattcttcctatgagaatttgtctaaattccgtctttgccgatggatgtatcagaacggagatataaagacgccacattctttggaagagatgtctgtggatgaacggattgtcaatgtgcataagaagttgagtgaaagtataagacagtgtccaaaaacgtttttcatctgggacacaaatatcttttattctttagtgaaagagatcaagtactttgcaagtctgaatctgataagcaaggacgatgtcatgcatttgaaggaagagcttcttcagttacttgacgtggtagaacatctgtccataaaaggagagttcagcgaaaacaagaaagtatctttctatctgtccaatatcagtttcgaagccacttacagttatatcgagaaacatgattaccaagtcagcctactgcgggtatattctatcaattcgatggattcgcaaagctcatatatctgccagatgcaacgcaattggattcaatcgttgaagcgccactctattctagtttcagaaagtggagaagcacagcgtatcgcttttttacaaaagcaattggaagttatcaataccttgtaaacaattgtagattttaggatataaaagaaagaggtgtaaaagacgagctgtatcagaatgaagacaaacaacattctgatacagctcttttagcttttattctattgtgcgcacacaacgataccaagcccaattggtggattcttccgtagtccatgcaccgaattctccattattatgtccgaccacccaatagccgccatcgcgtgaagtcaatgtccagtgcacagcgctaatcttctcgaatccgctccctgtccaagtagttgaactaccgaaaccttggttctcgatgctggtaatggcccctcccatactgagtagcaaatacatctcacgctgggtaggcagacgccagccactctttttttcttcgcatgccgcttttgcttccgaccaagttttaccattactactggaattttcaatctgaagcttaggagcaaccttattcatcgcgtcacttgtacccggagtttcacctgaagcaaataacaccgaaggatccgttcctccactggcatcgcgagagacaatagtgacccccgaggattctaccgttagataagggtacttctttccactatttgtattattcctcacgcaacggaaataattattcttgctaacagattcggaatccaaaaaacctgccgacatctccatccaaaaacgggtagcagagcctttagcctcatagtatgatgaagtccagtaattaccggtccagttttgataccacccatatatattctggctatcatgattattataattctccgcattgccacccaaagcattttcataagcgaatgacagcaacagttcactggcagtaggcaaacgccaaccatcgcctatattcctacagatatcctccgcatcggctacattttccaaccgccccacactttgtttggcatcgcctactccctgataatatatcctgttatcaaaccgaagcggataaagatagaaaagaggttccccggcagttgtgtaagatttggtttcggacaccatctgaaagtcaatcgtacgataaaatgggaattcttcatccgacacagtatgcattacatttctgaacgtgattcttatcgttccgctttttccctctttccacttgccggggtgaagcttcagcctaaaatcgtatccgtggccaaccacatcattccccttgccgtcatcatagcctatgatagactcaagatacatcttgtcgtccgcattctttctgcctataattacatcattatccgaatcggtccgaatcagtccggtaccatcatcgttcgttatattcaattcctcaatatccataatttcccaattgttattgacaaataattgcaagtattgttccgcacccagattgactttataagtacggctattgactgtagtgggaatatatcggaatgagaattccaactccccttgattgatggggaattgtacatgagtgaggtatccctccttatcgtacaggccgaataagatgaagtcccaacgccaccaccagcctgcaccatcttccacagtaccatcacctgctcttcgcggattaggctgtatggtaaacgcctgcaccctttcactgaatggtaccgtattcgtcctgtctaattgcggtattaaaccgccggcattgtattggatcatactgatatcgttagtgtcaaaaagtttgccttctatcttatccacggaaaacatgacatacaccgtctgcggttcaagagggagttcgtcaccatcgggatttctaatcgggaaaaaaagacctctctccaacacatttccgtatgcatcaacaaatttaataattcccggatctatcgtatactgcgtcacttcaatattgtgagtcaagcgccctgctgtcaacgtaacagtagccttacgctcaacacctatagtttcattattaaaataaggaatcttcaatttgagttgggtatcgtcgttcgcaacgcccgacgccgcatcggctccaccttcaaatttgagccagtcgctccctgcagtaacagtggccttccagccgccgggactgtcagtaaaaacgtctatggcataactattattctggtattgagttacagcgacctccgattcacccactccgagcatatattgcccattgtagactacatctttgaccttatcacggtcatagtgtatcaaccggaacttcaggttggacatgactgtataggatgccaacgcctctctaagacttgcataaccggttcctaacgcctgagtaatagtaatgatgtatttatggtttcgcttcaaaggcaaatattccacctgctctcctatatttccggttttggtgaaatccacccggtaaaatgtcgattcaccagtaccaatccttcctttcacaatcaggcaagtggcatccttacggctcgcttctccgtcttgtcccacaccaccggcatcctctgccgccagggattcaaaggtataaatctccccatcgtagggtgtgttaccctttacggagtaaagaattgcatccccttcttccgtcattttaccactgttcgcagggagaaccggagtatccggagccggttcagtaacctgtccgttcgtgttccacggcggagcaatgtatccggtggtattgtaattagccaggtaaacctcttcgaccgtgaaattcgaaatgacactgttattacggatatcgatacgcgccagcatacgtttcatatttatgccggttatcggatccatcgaaggagtgattttgcttattaccttctccccgtacatcggaatccgcgtatacccaccagtcgtcgatccgtctgccagccatttgccggtctgggcgtggagcatcttttccattgcctcatccttggtagtcactcccttcgtgaagcccgacacaatattatcaagttccttatttgccacaaccacgatgcaggtagatgcggtagtgggagaaagcacagcagagaaactcacagtggaattgtcagccaagtcctgagtaactcctgtagcgctgacccattccagatataccgccggtgtttttgacatatcaaaaacaagaatatccaccgtttctatttcgtcttctttctttgctgttcccgttcccgtcatcgtacgcgaagatacggacgggaggtttacatcgggaaccgttaatgtaaaccggataccgtttcctgttggagaaggtgtcgaccctaattcttcctgtacgcatccggtaagccataccgtcattaacaaaacaggcaaaagatagcaccttcttatgattgaaatcccatattgcatatttctatttcctttccttaaactttaatattgcatattcgccattatggcgcggtcaatgtcaccgctattggcagattatcaccattcgtattggttagtgtgagtgtagccgtatcaccggacacagcatcggctctaaagtagaagtaaaccacatcaccactcacgccacttgtttcgagcattgtctcactgttaagcagaattttatccggatcctgtatctgggttatcttccactcccacgttcccgggttgcccgaagtaaagacaagcttgcgacgttgcatatttccggttccaccatcactgccgtccaattctacgttcgaggtcaaccactctccgtcttctttccactggctcaacagtacatgatgccgcagattaccggcattgatataaaagcctgtttcccgcttagttccggttccggagttaaatccgggcatcacaacctggatattataggtatatacacctcccgaaaaggatgtctcggccatattaaccgttgcccacgtatccatagtacttttgtttaatgacgcacccggcagatagcccgtatccggattggcatcataattcgttttcgcttctatattgacagtgacaccatcaccagccgtctgtaccttggtctgcgataacttgagataatattgtttgtcgaaaatcacattcaccgggctttccgtccattcaagcggcgtggctgaaagctgataggtttcgttggatatcgtaagattgtagttgatgtactcgcccgactcccaagagtgcgggttcttggcgataatatcactgaacaggaattcccggtcgccaaagttggtggtaacaacgattttggcggttgcggagaaagcgtcggtcggcaacatgaggaatgtatcccccatcaaggtggcatcttcggtcaccgttttgttatcggtgagagtagaaacgaccttcccggtggcgacatcgctccagacaaacttcggtttgccgtttttcgtcgtggtggtcggaatttcagtcatggcaagtttaccgctttttcccacattctggaattctattttctcgatagtcaccttatccggtacaggagctactttcttgaatgtaaaggtaaccttagtcaatgtgtggtagaagtgtatattcacaccctcaacccatacagggcccgatatagccgccagtacatcgacatgattggcggcggatgcattcgctgtataattcagcaccatttctccgggatcagtgaaactcgcagtcggcgcattcgcatcgttgtacggataccaggagaagaatttcatgctcgcattcagcaatccgggccaatattgcaacggcgagatggtggctgtcaggtcggcgttaaccgtggcacttgcattgaagtatggttggggaacggaagcattgggagtcagtgagccgtaaagaccgaaagtctcttctttcagatcagtattcgaagagattgccgcaccacgagtgtagacatagccgccttctccgatacgttgcacaacaattaattccttatcacacgtcatctcttctctgacacacgaaaagaggacagccgaaaggacagccattgccataatcatcttaatattatttatagtctttatcatcttacttcttttccgaaattaaaaacaatcaacgaaagatattacaagtccatatccagatcaatgtcttgtctttcaccccaatcttctacgcttatcgtcagtatttgaatacctatttttcctacgcgtgccgttacctgatacacattgttccgacggatctctgtaaaaggttgcgctgtcggactgcctgtaccgtcaacctttgttacgctttcaattactttctcggttattccggtgacgtccgaagggcctttcgggacattagccatactgatagacagtcggtcggaataatccgacttgaatagacgttcggctgtgtagaacgagcaaagcaacttccggttttcagctccgggagcagatgaatatgcccaagtttctgtagtcgcagctgtccacttatgcgttaacaaattgctttccgacacgtcttccttcacttttccgtagttttttgaagagtcggtgttatcacgcgtgccgttgtccacgtttcccatcacgaaatagctatcgtaggagaaattgtgcaaggtgacactagtgcttccggcaatatatccggtcaccgccccaccgtctatagcttcgataaagacatctacccgggctacggcacgttcgatcaccatttgtactgttttggtttcatcaggtgctatggatatatcccggatcactcctgtcataggcattccggttgccgaaataatctgcccgtcactattcagtatgctggagatatcgtaaatcatctcctgcaacgtcaaaagattggctataccgtcaagtttgcttgtgaggctctgcggttcgttggcaataactacgaccaggatatcattactggacgtcacttcgagaagttgcgcatctatatcagtagctgtctccggagtactcaacaggatgtgttcattcacatccagcctcacgccaccgggcgtgctgccgaatacgataaaccgcatggagtttatcttctcctgttgttccacatccccattgttcaccaagtcgatgctaagttgcgcccgggtagtatgggcaggcaactcataagccacatcagcttctctactacatgagaacaaaaggatggtggatgccagacaaatgatatgtaatagcttttttctcattcttaaacttccatcccgtggagccaatgaatccagttccccacgacaataccaatttgaaggaatcctcctccgtttttttcaacaactgtaaatatcaggttccattcactctgcctgtcaagatattcctgaaagggaagctccgttccgtcgtaacgggaaaccggctgtgcaatactcaagagtgtcatcagattatagctccagacttcagcttcggtattcgcatcccttataataaatttataatcccatccactcctgttgagcaaacgcatcgtgttcaggcgtgcggacataaccacgtcggatatttcacccggacctgtatagtaaggcacataagtaaccggcccttgtcctgcgggttcgttttcccaggaataaactgcattttccggcgcctgaatttcaaatgtatattgtgtgccatccactttattttcctcatatcccattaacgcgagattaaaccgattggtgtcacgtatcaggttcaccggataaattttatggtcggtactggatggcaggtggtccacttctacaacctctccgaagtaaagatgctgaaactcgaaattaacaacatccgtctctcgcttcagggatacaatgacctgttggagggtgctagttcccggtgccagtttattacctgcattgtccgaaagacggaatctgtcagacagacttccgacggtcagtactttataacttccgaaatcgagctcgtcggtcaacgacatccggtttccacccaccagcgcagcaacctcggcacttttggtgaaaagcaatttatcatcgctgtcgaacacaagtacatccaccgatttaacctgcggattaaatgcatccgcatattccatattgtagtcgaatacaaattccaaccaaagctcgcaccgtggaaggtcttcgcgtatactgtcgcacgaagccatacatagcatcgaagcaacgataaggaacagcgatttagtttttccgaacatatctttttcttttaggaggcaaccctatcggtttgccattttatattgtcagagatctctattttgtgacctccggttatttcctcttttaggggcgcgctttgcatttcattgcatctcggatgcgccggtatatttcagtgctgtttttgggaagcctgtcaccggcttgtttttacttttttcggcggtctgttccgcacagaatatctattaaaaaaagtacagggcaggcagtccgcactgccctgttttctttgaaagtaaagagtttctttagatttcgaaatttgtagtccagtatatccacggagcaactttaatctcaaagtggagataagcacctttcttatcgatatcttcttcttcatccggatcttcgggtccaccaccaggataccacggtgtaccgttaccatttacctttgtcagcgtaagcgtataatagttattacgtactacaccgtattttccatactccatataagagttggctgcattgtcatgacgaatctcatagtagtaatagttgagactctttggataccaatagatgcaaccttcttttttacacagttcaccaccattcttaatgttgttgtcatcaagaatagtctgtgtaagaagagcaaaactacccggatcattggtagtaagttcagattgtatctgagtatagaacagttcgcatgctgtaaccaagagtttctcctgggcggtcatagggtctgagtttgtttgtttagctttagcaggtgtataagcagccagcaagtcagcaaaacttttgaagtttacagagttagttccgttaggaagacgataccagtcatctcccaaagtaaattcaccggacttccaaggtgcatactgtcccttaagtaccagacgcgtagccgcaccgaacttctgatatccttcagccatcgtattctcgatacagtatttataattatcacccgcatctgcactttcagcaacccactctaccttaggttcgcggttagcatcaagtgtattcttaacaatgcctgtaagatattcagttccacctgcagtcgtaaagttcgggtcaactgtatagaagttacttttgtagaatccggtagtatgagatgacgctgtggtagtcttctttgcaaaaggatagaacagagagttatagtagtctatagtccagtttccaaaatcaaattgtccaagacttgcatttgttccatcttcaaaaggtccaactgctaatggactgccaatcataacttccaactttgcagcaaggcgttctatctcaagagtagccggattacttttcgctgcattctgagcttgcgcttccgatttatagtcactgaccaaaacaatcttgtccgatacatcgagcagacattcatctttccatgcatgattggatggatccgaatcggaatcatcgtagaatccgacattaatcattgcacaaccattggagtgtacaacctcctctaccagataagcattgttgggcttagtattgttttcaggaactgtaaccattgcattgatggtagcataggttgcaccctctgaaaggttatccaagcgatcctttaattggtaacccggattggctataacaagcaaatacttagtattcggatccactttaaccggagtattcggagtcgtaactccactatttgttccgaaagaacctgatcccaataccgtggcatacttagttgccttttcatccttagtcaccaccttacccgcatcgaacgtaatcacataaagctcattaatcgcgctttctgcaggcaaagccggctgttcaccagaagcacgtgaaccaggcacttttggattagtcagactaattgatacgtaagctacatcataacctgctcccccttcaacctccggattttcctccagattctcatttgaacaacttgctaatgccacaacggccagcaacgaaactaaaattgatttaatctttagcataatacaaaaaattattagaattaatacatatataatttcccacttaattagtaagttttacttaccattttttctcatctcggcagcattagccttcttcctgactaattcttccagattgcccctagctgcatccagacctaactgctctgcgaccttcaaatacttcttcgataattcataatctcccttcattaacattaatattcccatagcattattatattccggcaaattcttattcgaattcaccatacccagataacgttcggccgaaaccaagtcattgcgtgataaagcggcagtagcagcatttatatttgcaatctcactctgcggatacatccgtacagccgtttcgaacacatcaataaactcttgcgagcctgtcggataggtattagccaccagaaacatttcattcaagctcaaattctgcggacgcgtcttgataatctctttcgcttcctccacactgaaatcccgcacttcataattcactttgcagatagccacacgcagacttgggaaaatatacttcaacaagtatcggtaaggcgttcctccgtgaagttgcatcagttttgtttctcttcctttttcaataggtatgttcctgataatatccagcacttcgtctttatattccaattcgattgtttcaagcgctttctccagtccgtcccagttttcacctccaaagacaatgtagtattggtttctcggaaaatcgtacctgtatgccagataatcccgaagcgccatagcacgcccttcagacagacgtttgttcgctgccaatgttccttccggagaagcataaccgataatatccagacggttcactttcacattcggatcggacttcagctcatcgatcatcttgcggattttagctagttcctgaggattattcatgtattcgggacgaatattgactttattcacctcgaaatccagaaaacattctgcttgaatatcccgttgtttgatttcttccgctttcggttgcagataagcaaactgaggaaccactacgtaaggcgtccatacacgttccaacgtcactttgccaaactcctctatgttcatcaatgccgtttcgccgcaaccacattcatcacgctgcacgtccaagcgcgcatccttcatccatgattcgaacggaaccagatattgataccgaatcgtatcatttcttagttttccagctttttccactatatatggcttctcgtagtttcttttctctttggcattcatcaacgcaagctcacgctcatacgccagatactcgtcacgacctttaatagaaactttcggaagattctgagtacgtccgggagtcaccagccgcggaataaaatccattccccgggcagatttcactttcacattattcaaaacaaaatctatatcgacatgaataaaatcacctttctgttccaaccgcaccggattcacagtaatgacaccttcgtaagagcgggattgagccatagctgtgtttatattcaggctgcaaaccaccaacatacacacaaggaaacctatttttcttattatcatactcctcattatttaattacataaataagtgacacacttgctttagtaggcccgaaatagtttttgctgctttcctttagtctcgtaccacaagtagcgcaaggatacttgtcatatacaatgtgcgcatatcccactccgacagatgtttctatactccagcgttttttcagaatccacgaatatcctacggaaaagccaccaccataaagatatccctgataacgcgtatgctgcatattgtcactgataaaagaccagtcgggccatccccctacattgaaatcggcataatgtccatgcattccgacaaacatacggcgaaaactctcacaaaaccagtaacggatttcgggctgtacccccaaatgacggaggcgtttgccgtcggaaagtttccacggattataattgaccggaatatccagcgtccatttacacgccagtccgatctccagtcccagattcatggtagtagtagcgtcatacagcagattgcttttcagcgcaaccttctgggcatgaccctcggaaatggcacatccgagcatgaataatatgagtatagcaactttcttcatttatatcacatttactgttgtttattgccccaattgagtaacatctatttttatgcgttgcacattactgatgcccgttttaacggaagacaccattgttgtgagatgtacgattccgtttctggaatccgcctctacattgggcaataccttaatatagatcttaccgtcttcaacgataatgcgttcttctcctgtatgtccctccggcattacggaagaatacagacgaatccaatttttagcactttcatccacttcgcccgtaaggcagaaataatcgatttcatacacctccgaatttaaatttccagtaggcatgagctgaagtgtacttcccgtagcaggaacagcttccctttgtctaatatgaacttctttttccaaatttcctgtttttaatgttataaattcatggggatagtttcttgagtgtcactataagacagagagccaagcaaaggattgctcaacggcttagtcaacaacctggcatatatatccgcacaagttgtcaccttcgatgttaattgaaagagagtgccggtcacattcgacccctgcacacacatcacagataataaaaaaatcaaatataaaatactgattgtaagttttgttatttctctcattaattctccaatatactttcttctacttcttgtatatctctcttatttctctttttgcttttctctcaggacaatatttttgtccaaatctcatattgcaaatttcggaatattaaaggagatacaaaattgtattcatttctgttacagagaatcaacttagaataaaggggctaattatgcaggtagtgaacaagagggttacgaaattcacaacaaaaatatttaatatcctcatttctttcgatatgcgaacattaaaaaaatcccaagtttctctcataaaaacttggacaatggaaggaagttatagttttctgtgtcatttagacacaacttaggcacaaattagacaaaagacatagctattttatacaacaaaacagcccaataacttgtataatttgtgcctaaatgacaaaaagttcaatttctatatgtatatatagttatcaaattataaggttttacgctcagtttccgtaggtgccacctcatcaggaatactgaattcgcgattagcaaacagatcagcaagacctgaaatttgtttcaggcgcaacaattcatcacgatccataccaatatttttcattatccattgatcggacatacctgccttgtcaagttccgcaacaatattgcacatcaattcaatgttatgcattccacgcgcacggttgtgccggatggtcgaactcatacggttagacaggtctttgtctatcaccacaatcggcaataagccgttttcacgcttatagattcgttgggaagttttcaataccgtatagcgatggtagccgtccaccagtatataatggtcttcatctttattgtagtaacatacacatggcatcgtaaagccatcttcccaaatagaaagttccagcaacttcatttcaggcggtgcaacgacattcggattataatcgttcgcatatactttttctacgggtaccgcttttacctcgtaaacagggcttttatctacactcatgatactatgattctatattgttccataatttgactcctcttactcatctcctccttcgtaggtgagaatcccatatatttgcaggcatggtcatttttaagaatacaaacacacattcgcttatacgtgggtatttctttgaattccggaatgtcgatatcatcctgatattccatacgtaccggttttttcaacgttttgtagttactgttgtccataacgataatcggtactttcgcatcaatcaacttttggatggtagcatcacttaggcatccaccttttgtccgccagaaattcacactcactgatagtttacggagatagtttttcctcgcccgttccggcaaagtggacaacaagaaatacataaactcacgccatgtatatccttcgggaagtttcaccgactgccatcccatcgcatgagtaccgccatacataccggtaaagttcacaccgttcacccttccgaccattttaccccaggtattgggatctagcacccggtaaagttgcaggctctcttgcgcttcgttaataaaaggacttgctacacgctgacgctccaaattgactccagcacgatagtaaagatcatataaagtattataatcccactggaattttccattggccgtccatacatccgttgtcttccagtcgaatataggataggcattataaatatcattccctacttttgaagtccatttgtatttatgatacatctggaatttacggctcatatagatacatctccaccggttgaaactctcctgtgtacggattccgatcagacaacaagtgcgcactgcgtcatttttgttgtgtatccattgcgcaaaacgcatctggaattcataatcccacatggttgtattataaaaaggaaaatcatctttggtcattgcctttttaggcatggaacgaacccatatattctttttattatcttcccagggacgccaaaaggattgatacatcgaggtacaggtagccacacggaaaggaatacatacccggtacacatccagaatatccttgttagcttccagcatccggtccacatagtcgatggtcattttatactggatttcataatccatgtgaaaaactcccaaacgtaccttcaggttattcttccggatataatcgatacacatattcagcagtaccccgctgtctttacctccggagaatgacacatatatattatcaaattcattaaatataacttttagtcgttcttgtgctaattcatatacattctttgtgcctgctattttctttttcgccataagttatctatacatttttacataccgtgtccatttcttgtccatcgatacaaattcaaacttttcaaatgtttctttatcttgtaccagtgtgaccgaattgagcaaccaactctcaggcccgaattccgcaataacggcaggcaacaaatgcgacaggatttcctcccgtccggcgtcttctgcctttacataataattattgattacagctttcttccggcttttctgttccaccggcacgaagcccaccacttctttatcttcaatcgcaataaaccacacatactcttcgcccgtcttgaaagggtaattattgtttgcgcgtatcacttcgggatccatcaccatcggcgccacaagccgatataaatgtttgtcttttccttttaatcgtattatctgtatcatatcattcaaaaatggacacacaaaaataaggaaaaaatatcaaattcgtcatttctgttcctaaaacatttgtttttcatgttattatctctatatttcgatatttttgaaatcacccgtccgtcattcctctctcacgtttaaagtaagtcagtatggtggcaaagcttagatattcccgcccgggagtatgcgaccggctttgaaattgataacgggcaaagatgacttcacatgccagtttatatttaaaatgcagctttaagcggtgctgtaaaaactcaaacacccgacagagatatgcaaacacgtctcccactttgtcattgggaatcactcgtggctcacgatgcgtatccgatatgtgttccatttcactaagaacatattccagctgctctatttcctcgctagtgttttgcattgtacatttcatttgttctattttctcttcctgacgaatgtactgttcacgctttcgttgtaaacgttcttttatgttctctattccttttgacattataaaatttagttatatataaacggtttgaccttactgattattaaccgggaaaatgccatataaaatctaatctcacatgcaaatatagagaagattgtttaaataattagatttttatttaaaaatattcatacttataacacatttaaattaccagcatcataaaatcggtttttccttccaatgaaacgaatcgtacttttgcggaatatttaaatattttaaacaatggataatcaatcttttgactggctgcttcatggctgccatgcactgtccgaagtggcagtagcttattttccgaactatcagtataattgttcagcggtgaaagcgttccggcggatcatcaaagaacatgcagtattactgaaccaactcacggaagcgggattcacccggcataccacaacgctcactcctcagcaaattgcgattattgtaaggttctggggaacgcctgcattagtatacgaaatgataaaaaagaattcatatcttgctgtcccgaaaatggggaaaaagatataatgtattttaatacattctttttttcatttatatattaatggatgaaggggtggtcgaagtgctaatataggcatgccggcctccccttttaacagggcgtttgagcaagagtagaagaaggcagacagagaggtccaaaaatataggtaataatcaggggtattggacacatgagccaatattaaaatatttagccgttcataaccgtaaaattgtacatctcaaccaaccggactaccttcgcaccaaattaaaacaatataaagtatgattaaatctacagcagaaatgcttaaaaagggatatctcctcttccctaaagtcttattcgaggagcaaataaaagtgactaaaggtgcaacaggatatttcgacgcgtttattttggtattaacgcatgtcaattatagtactgtggaatgtcgcatccaccagtacacatttcaatgccggcggggtgaatctgtaatgtccatggttcattgggcagaattattcggttggaaacgcagtcgcacgcggtatttcttcaataaaatgtacgatgaaggtattatcgaaagattgtctaatccatatatcactcacatccgcatacccgactacgatctgttggtcggacagaaacgtcgggaaagtgtccgtgccgaagctgacggtatcaccttcgatgcgttttgggaaaaatatcatgatattacccggaagcctaaaaccaatgtcggccgtgctcgtcgggaatggaacaagttatctgtcaacgaacgttgtctcagtcttagtcacatcgatgaatattatgataatctggcggatatcaagtactgtatgcaggctgcctcctatttgtcaaataaggcatttatgaatgaatatgactattagaaaagaaaatgagtgagataacaaacccacaggacgccgaactcgaagaagtcgtgctcggcgcctgcctgctggaaagcaaagctattacactggttgccgacatattacggccggaagtattttacactgaaacgaaccgtgagatttatgctgtcttgcagggtatgtaccatgccgggcaagtaattgatatcatgaccataaaagaagaacttgcccggcatggcaagctcgaatttataggagggctttatacactggtgcgtatcagttcacgcgtagtgtcgagtgctcacctagaatatcatgcccggattctcaaacagaaatatatccgtcgtgaaacgattttaggatctcacaaactgctggcactggctgccgacgaaacgactgatatagacgataccttggcagacgcccattccctcctcgatcgtttggaaaaggaatgtggtactaccgagcatcttcgttctatgctgcaacttatggaggataccattaaactaatagaagtccgtacagcctccaacaagaatggtgtcacagggttgccaaccggatttactgatcttgaccgcctgacatgcggctggcaagcaggtgacatgattgttatagctgcccgtcctgcagtagggaaaacggcattcgccctacatttggcacgcaccgctgcttcggcgggatatcacattgctgtatatagtcttgaaatgcaaggtgaacgtttgggagaccgctggctactggctgccactacgggagttaaccccgatcatctcctcagcggacaattaactcccagcgaattacggcaaatacacgaggcatcaacagagttgtctcatctacctattcatatcgatgataatccgtcggtgagtatggattacgttcgttcttctgctaaactgctacaaagtaaaggaaaatgtgacggtgtcatcatcgactacctgcaactgtgtgacatgaaaacagaccaacacaaccgcaaccgagagcaggaagtagcccaagctagccgcaaagccaagatgatggcaaaagaattgcatatccctgtgatactactcagtcaattaaatcgtaatgtagaggggcatcccgacaaccgtcccagtttgagtgaccttcgcgaaagtggggctatcgaacaagatgctgatttagtactgatgctttcccgccctgctctctccggacgtgcgacagaccgcaaaagcacctactctacagatggattgggtgtgatgggtattgtgaaacaccgcaacggaatgactggtgagctttatttcagacatgatccgagtatgacgaaactggaggattacgtacccggaatagattggatgaagaagaatacaactacctgaacggtataataagacagtgttttacaagagctaaagcttagctttagaggtcgtaaagcgatgctttaggttatgaaaagcaatgctttacgatctcttctttttttaaagtttcaacaatcttatcccgtgtcttatggttctcccaatgcgtctataatcactcttacctccaaaggtgtgaaagaacggcagttgggctgataacccaggtcatacaggcgttgtagaagtcccggacataacaggatccatttcttcatttttcgataagcagcgatgtcggttagttcgggagaataaagtgaggcaagttccatacggccatacgcacgtattgtgaattctttcatgataaataagctttgatttatatctacaaaattaacaaaatattttcacatatgcaatactttttcaatgaataactgactattatcatgcattactgacaggtacaaattgaataaccgatatgcccatctttatgccaaaacaagttgctcgcaaacttcttggttaccaatattggaatagcactcatgatgctgtatcaatcaagtatttacgacagtctgtcaccttaaacaaaaatcgtctattaaaaagtcagacaaaatttggtcaaatattcctttttattaattaaaaaggctacagtttcacaaactaatattggatttcagtctcttttccatatatttgcgcccgcatttttattattggatcaacctccttattcaatttaccaaactagataaaacaaatggaaaatataaacgcagtaattacaggagtcggaggatatgtacccgattatatcttgaccaatgatgagatttcaaaaatggtagataccaccgatgaatggattatggggcgtattggtattaaggaaaggcgtattctgaaagatgaaggactaggaacttcttacatagctcgtaaagctgtcaaacaactgataaaacgcacccatacaaatccggatgatattgatctggtaattgtagctacaacaactcctgattaccgctttccttccactgcttctattttatgtgagagactggaactgaaaagagcttttgctttcgacatacaggccgtttgcagtggttttttatatgcattggaaacaggagctaactttatccgttccggaaattacaagaaagtggtggtggtaggtgctgaaaagatgtcgtcaataataaactataccgatcgggcaacttgtcctattttcggcgatggcggagcagccgtcatgcttgaacctactactgaagatttgggtattatggatgctgtgttaaggacagatggtaaaggattaccttttttacatattaaagccggtggttccgtatgcaccccttcttattattcattggataatcaaatgcactacatctatcaggaaggacgcactgtattcaaatacgcggtatctaacatggcagatgcctgtgaatctattattgcaagaaaccatctaagcaaagacaatatcgactgggtgattccccatcaagctaatcaacgcattatcactgctgtaacacaacgtttggaagttcccgccgaaaaggtcatggttaatattgaacgatacggcaataccagtgcaggcactctcccactctgcctttgggattttgaagataaactcaaaaaaggagataacctaattctcactgcattcggagcaggatttgcctggggagctatctatataaaatggggatatgatggaaaaaacagatagcgattaatcgctatcttccaaataaaaaatcctctgatttactagaaaccagaggattttttgtttggaaagtgcggtgcgtacgggactcgaacccgtgaccccatgcgtgacaggcatgtattctaaccaactgaactaacgcaccaaaatattcactaaagcatctctctcgattgcggatgcaaaggtagatatttttttgaaatctgcaatagcttcagtatcttttttctgaaaaagtggatttattaagaattatcgtgtacatttgcagctactaataaaatagaaaatagaatgaaaaatacaccaattgaacgacatctgattgatgaaactataaatgagtttcaaattgtcgatttttcaaaagctaccattcgggaagtgaaagctattgcctcgaaagcagaagctgcatcgggagttgaatttatcaaaatggaaatgggcgttccggggctccctccctccgcagtaggtgtgaaagcagagattgaagcgttacaaaatggcattgccagcctataccccgatattaacggattgccggaactgaaaaaagaggcgtccaactttatcaaagcatttatcaacgtggatttaaatccggagggctgtgtacctgtcaccggctctatgcaaggaacattcgcttcattcctcacttgcagccaatgcgacgaaaagaaagatacgattttattcatcgatcccggatttccggtacagaaacagcagttggtagtgatgggacaaaagttcgaaacgtttgatgtatatgactaccgcggagacaaactgaaagagaaactggaaagctatctgaaaaaaggaaatatatcagctatcatttattcgaatcccaataaccccagttggatttgcctgaaagaggaagaattgcggattatcggtgaattggcaacgcagtatgatgtgattgttttggaagacttggcttatttcgccatggacttccggcaggatttgagcaaaccataccaacctcctttccagccatcagtagcccattatacagataattatgtattgttgatttccggttcgaaagcattcagctacgccggacagcgtattggcgtaagctgtatctctgataaattataccaccgaagctatccgggactgaccaaacgatatggcggcggtacctttggaactgttttcatccatcgcgtactttatgcactttcatcaggaacgagtcattccgcacaattcgccatggctgccatgctgaaagctgccaacgaaggacaatataacttcctcaacgaagtgaagatctatggtgagagagcacaaaaattgaaagaaatcttcctccgtcacggtttccacctggtatatgacaacgacttgggcgacccgattgcggacggattctatttcaccatcggatacccgggaatgaccagcggcgaactggccaaagaactgatgtactacggagtaagcgcgatctcattggttacaacaggaagccatcaggaaggattacgcgcgtgtacctcttttattaaagaccatcagtatgcgcaactggacgaaagaatgaaactatttgctgaaaatcatccgatagcctgattatctgacataagatattcataaaagccattctttaaatgaaaaaaaacggaaataacgattgttattccgttttttttcttacattagtggcatgaatatcgactctgacatatttaagattcaatcgaataatgtgttaccatcaagaggaaggattttaatatctgaaccttttctgcgtgatgcaacgtttggcagatccgtaattttactggtcgatcatacggacgaaggaagtatgggattggttatcaacaaacaactgccattatttctgaacgatatcatcatggaatttaaatatctggacgagattcctctatacaaaggtggaccgattgccactgatactttattttacctccatacactatcagacatccccggctctatctctatcagcaaaggactttatctgaatggagattttgatgaaataaagaaatatatattacaagggaataaaatcagcgaatgtatccgtttcttcctgggatattccggatgggacagcgaacagctaaataacgaaatcagagaaaacacatggctggtgtctgaagaagaaaaatcatatctgatgaaaaacaatatcaaagatatgtggcggactgctttagagaaactaggcagcaagtacgaaacgtggtcacgcttcccacaagtgcctactctcaactaatattttatttcttaggattcaaacattggagaagcaatgcatctttgtagcagccctccacttgcagccagtttttcaataatccgcattgaacgaagccacaagacgtgaacagctttacacaaacgtcattatctgtcgtgacatgtgcataaagctgacttaaagacagaaaatcaaaagcatattcacaaagcagcttcaatgcgtcggtggcatacccttgctgacgataatccttatgcacggcaattcctacttctccccgcgaatgaaggggaacgaaatccgtaatatcaatcgtaccaaggatacactggtcggatttgcgtaccatcatcagacgtaattgcttatccgcaaacacatcacactgcgaaccttcaatatattggcgcaacacgtaacgggagtatggaaccgtaaagttactgatatcccacatcgaaggatcattttccatctcatacattatatccatatcttccggttctaccgcacgaagatagatacgatcgttcatcaagaaggactgtctcatagcttttcttcttttgcaatgtgaagttcgttacgcaatctcttctcactgggcaggcagaaaagtgacgccgtaaggccaatcagcatacagaggttacccgtgctgctcaacgtcaggtagtaacacaaaaggttcaccacaatagctacttcaagcactcccaagcgaacaatgttccattgcacatatcgcttcaaggcaagcgtgatagtcatgtgatctatctttttcttatgcaccaagctatataatttaagagaaagaggcacacacaaagcagtaagcaaaatgccgaccgtctcaaaatagtagatagccggtgcgttatctaccaaacctcctacgggaaagagttcaaactctcctgccccaagcaaaaatgccgggagcacccaaaagaaaacataactgatattcaaatttctgacagctcgttttatctgttcttccatgttcgttcttaaatgattaataatgattatacagttccggtaaaaagcgtccggttcacaatgctgcgtcctaaagtcacttcatcggcatattcaagttcatcaccaaccgatatgccacgggctatcacacttagtttaacccctagtttatccagcttgcgatagatgtagaagttggtagtatcgccctccatcgtggtgctcaacgccaaaataacttctttgattccaccttcagccacccgctgcaccaggctttcaatttgaaggtcactcggtccgactccgtccattggagaaatgactcctcccaaaacgtgataaagcccgcgatactgctgggttgcctctaccgccattacatcacgaatattttccaccacacagacagtggaagcatcccgttgcggattagcacaaatctggcaagtttcagtatcggatatattatgacacactttgcagtatttcacttcacgtttcaatgttatgatagaatttccgaaagcttccaccgtagccgtatcctgacggagcagatgcagaacaagcctcatagccgtcttacgcccgatacccggaagtttggaaaattcgccgactgccttttcaagcagtatagaaggatattgttggttcatagataatatttgctgttctatcgataaaaccttgcaaagatacagattattgtttttaatacctacaaaaattgctacctttgcatctgttatgatgatacttgtcactattctttgctacttcgcggtattattactaatagcccgtatcaccggacgtaagggaggatcgaatgcagcgttcttcaagggagagaaccaatcaccttggtacatagtctcttttggaatgattggcgcctccatctccggagtcactttcgtttctgtaccgggaatggtgcgcggaatggatatgacgtatatgcaaacggtactcggatttttcttcggatacatggccgtagcccatatcttacttcctttatattataaattgaatctgacaagtatctacggatacctcggcacccgcatcggagtgcgtgcctatcgcaccggttcctttttctttctgctgtcacgcatgttgggaaccgcagccaaactttatctggtatgcctcattctccatacgtatgtatttcaggaaatgcacgttcccttttggctgattgctgtcggttcggttgcattggtatggatatatactcataaaagcggaataaagactatcgtgtggacagataccttacaaacattttgcctgattgccgctctgatttttatcatctattttacgatccaaagattagaccttaatttcagcggcattgtgcaaacaatccaaaacagcgaacacagccgtatttttgtatttgacgactggatatcccgacagaacttcttcaaacagtttttcagtggtatcttcatcgtcatcgtaatgaccggactggatcaggatatgatgcaaaagaatctttcttgccggaacctccgggaagcacaaaaaaacatgtactgctacggtttctcattcattccgctaaatttcctttttctatgcttgggaattctattgatagcgctagcgggacagatgcaactcgaactgccagccatgaatgatgatatactgcccatgtttgcagcccaaggttatctgggacaatccgtattggtactttttacaatcggcattatcgcagcagctttcagcaactcggattccgccctgacagccatgacaaccagtgtatgcgtagatctgctaaatacggaaaaagacacagaagaaacggcacgtcgcaaaagagataaagtgcatttatcgttatcagtcttattggcattcttcatctgcctggtagagatactcaataataagagcgttattgacgccatatatatcatcgcctcctacacatacggccccctgctcggaatgtttgctttcggactttttacacgcaggcaaacgaacgaccggtgggttcctctcatagccatcttttcacccctgctctgctatcttgccgactggtggattggaaaagaaaccggatataaattcggttatgaattgctaatgttaaatggaacgcttacctttgcggggttaatctgtatgtctaaaaaagggaaaaacgatgttacaaagaaataaatgacaagaaaatggaaataacaagtgctgaatttgtgattagcaatacggacgtgaagaaatgcccggccggcattttcccggaatatgcctttataggccgttcgaatgtgggaaaatcgagtcttatcaatatgttgaccagccgtaaaggtctggccatgacctcttctactccgggaaaaacgatgttaatcaaccacttccttatcaataagaattggtatctcgtcgaccttccgggatatggctatgcccgacgcggacaaaaagggaaagaccagatacgcaccataatcgaagattatatcttggaacgggaacaaatgaccaacctctttgtcctgatagacagccggctggaacctcaaaaaatagacctcgagtttatggaatggctgggcgagaacggtatccccttctctatcatctttaccaaagccgacaagctaaaaggtggacgtttaaaaatgaatatcaatgcctatttacgtgagttgggcaaacaatgggaagagctccctcctcacttcgtatcttcctcggaagaccgcacaggacgtgttgatatactcaattacatagaaaacataaacaaggatctcaatgttaaatgaaagaagaatgaaaatgaaaaagagttttttatctattgcctttttggcagtatttatgctaacggcaactaacagccaggcgcaatcatggtccgacttattaaataaggacaacatttcaaaagtagtaaatgccatcaccggaaccaccgaatctatcgacatgaccggaacatggagctacaaaggttcggcggtagagttcgaatcggataacttactaatgaaagcaggcggagctgccgcagctactatggctgaaaataagctgaacgaacaattaagcaaaataggtattaaagacggccagatgagtttcactttcaatgccgacagtactttcaccagcacggtgggcaagaaaacattgaaaggcacttactcctacaatgcttcaaccaaacaagttgatttgaagtatttgaaacttctgaatctgcacgctaaagtaaattgcagttccagctcactggagttactgttcaactcggacaaactgttgaaactaatggctttcatcggtagcaaaagtagcagtaccgcactgaaaacagttagttcactggccgaaaattacgatggaatgatgctcggattccagctctcaaaatagcaaaagagaatcgtttaatactatttcgcactccataaagtatattttaggggaaaagcattatctttgtcgtttgtaatcaaaaagagaaggaaaaatgaaaaagatactttttttaatgaccctgttagtaatgggcgtaagctttgcatttgcacaaacaaatgcagatatcaagtttgacaaaacaactcacgatttcggtaagttttctgaaaacagcccggttgtcagttgcacatttacctttactaatatcggcgatgccccgctggtgatccatcaggctgtagcctcttgcggatgtacagtacccgaatatacaaaggaacccatcatgccgggcaaaaaaggaacaatcaaggtgacttataacggaacaggcaaatatccgggacatttcaaaaaatcaatcaccttgcgtaccaacgccaaaacagagatggtaagattgtatatcgaaggcgatatgacggcaaaagatgcaaagtaggaaaaaatagactattacataaaggagaatctttcggttctcctttttttttgtttactttgaggacggaaatgtaaattaacacattagcaaattataaaaactatgaaacaagaagaagacaaattcaccgggttacccgagaatgcgttcagagagttgaaacccggggaagtgtacaacccgttgatgggtccctctaaaaattatccggaagttaatatctggtcagtagcatggggtattgccatggcaatccttttttcggccgccgctgcctatctggggttgaaggtcggacaggtatttgaagcagctattccaattgcgatcattgccgtaggagtttccggagctgccaaaagaaaaaatgcgttgggcgaaaatgtgattatccagtctatcggagcttgttccggagtaatcgttgccggagcgatcttcaccctccccgctctttatattctccaagctaaatatcccgagatgacggttaccttcatgcaggtattcatcagctctttattgggtggcgtattgggtattctattcctgattcctttccgtaaatacttcgtcagtgacatgcatggaaaatatcctttcccggaagcaacagccactacacaggtgttgatctccggcgaaaaaggcggcagccaggccaaaccgttattgatggcaggtatgatcggtggattatatgacttcatcgtagcgacattcggatggtggaacgagaattttactacccgtgtttgcagtgccggagaaatgctggcagaaaaggcaaaattagtattcaaggtaaacaccggtgccgctgtgcttggtttgggatatatcgtcggactgaaatatgcttccatcatttgtgccggttcactggctgtgtggtggattatcattccgggaatgtctgctatctggggtgacagtgtactgaatgcatggaatccggaaatcacctctaccgtaggtatgatgagcccggaagaaatattcaaatattatgccaagagcatcggtatcggtggtatcgccatggcaggcgtgatcggtattatccgttcctggagcatcatcaagagtgctgtcgggctggcagccaaagagatgggtggtaaaggaaatgtagagaaaagcattatccgtacccaacgggatctttctatgaagattatcgccatcggttccatcatcacactgatcttaatcgtattattcttctatcttgatgtcatgcaagggaatctgttgcatacattggtagccattgttctggttgccggcatctctttcctgttcaccacagtagcagctaatgccattgcgattgttggtactaatccggtttcgggaatgacattgatgacactgatattggcttccgtagtgatggtagctgtcggactgaaaggtccttcgggcatggttgccgcattggttatgggtggtgtagtatgcaccgcactgtcgatggcaggaggttttatcaccgacttgaaaattggttactggctcggaagtacgcctgccaaacaggaaacatggaagttcttgggaacaatcgtatcggctgcaacagtaggcggtgtaatgattatcctgaataagacatacggatttacaagtggcgcattggctgctccgcaagcaaatgcgatggcggccgttatcgaaccgctgatgagcggtgtaggtgcaccctggttgctatatggcattggtgctgtcttagctattattctgactctttgtaaaattcctgcattagctttcgcattgggtatgtttattccattggaactgaatgtgccgctggtagtgggtggagcagtgaattggtttgttacaacacgtagcaaagatgcatctctgaatacggaaagaggtgaaaaaggaactttactggcatccggtttcattgccggaggtgcattgatgggagtaatcagtgccgcgatgcgctttggtggaatcaatctggttaatgaggcatggttgaacaatacttggtcagaagtgttggcattaggagcgtatgccttactgattctttactttataaaggcttcaatgaaagttaaataaatcattatgaggagactattatccattatagtatcacttgtaactgccatatcatttgcgcagcagcccgtcgagctacctttgtggcccgacggtgctcccaactccagtggactaaccggagaggagcaggaaacgcgtcctcattttgtcacgaatgtcacgcatcccaccctgacggtctaccacccggaaaagccgaatggaatggctattatcatgtgtcccggaggcgggtatcgtggattgggtatggatggagaggggtatgatatggccccttggttctgcggacaaggtattacctatatggtattaaaataccggatgccgaacggacattgggaagtccccgtatcagacgccgaacaagccattcgcatggtacgccaacatgccaaagaatggaatgtcaatccttacaaggtaggattaatgggagcctctgcgggagggcatttaactgctacacttgccactcactacaattcggaaacacgtccggactttcagatattactttatccggtagttacgatgatgcaagtcacccgtggaaatacaagaactgcattgctcggcaaaaatcccacaatggaacagatacagaagttttccgccgaattgcaagtaacgcccgatactccacaagcatttatcgctcttacctccgatgacccttccgtagcaccttaccacggagtaaactattaccttgctttacagaaaaacaaggttccggcaactctccatgtttatcctaccggaggacatggctggggatttcaggatcattttaaatataagcaacaatggacacaggaattggagaaatggttgcgcgacggcgttgtattcccggaaaaccccgaacccatgttacgaatcgggaaatcttacctgggaactaaatacgtggctaacacattagatcaagacggagaagaatcattagtgatccggactgatgccgtagattgcctcactttcgtagaatacacgttggcacaggcactcggctcttcctttgccgacaatctgcaaaaaatacgttatcgggacggcatcatcaacggttatccttcccggttgcattatacttccgaatggatagagaacggaatccgccacggattcctcaccga

SEQ ID NO: 8487 - DNA, 980 bp, Unknown
  gut microbiota DNA sequence
tatgaaaaagcaatctccagaaaagtcgtacattggttgccgaaaagcgaactgccggaagccggattgccctggatcatgaatggagacattattgctattacaacgaagatgcccggactggacattgctcatgtgggaatagcagaatataaagagggaaaactgcacctgctgcacgcttcttctacattgggaaaagtagttgtcagcgacgaacctctcaatcacatgctaaacaacaataaatcgtggacaggcatacgtgttgtccggatgtctcactctaaaaataactgattatgaaacgagtaaaacatttccttctcgcctcgtgcttattccccactttgctgggagcacaagaaatggcaagcgcctattttctggaacttactccggacgcccaatcggcaggtatggcaggtacaggattagctaccaccgataacggtagtacagctatttttcataatgcttctaccatcgctttctcacaagaagtgatgggtgcgagttattcatacgctaagatcaaccaagattatgcgctacatagcgcctctcttttctaccggatcggaagggaaggcatacatggatttgctgtaggtttccggcatttcaaagatcctaaggtattcgattaccgtcctcatatctgggatttagaagctgcttatttcagaaatgtagccaaaaatctgtctctttcattaacgttcagatacctgcaagccaaagccgcggaaaacgcagacagcaagaatagcgtttgtctggacttcggcgcgacctactatcgcaatatggctctattggacgaaatggcttcctggagcattggtttccaagctgccaacttaggtaaaaagctggacggacaaaagttacccgccagattaggattgggaggtacaatcgacctgccattcagcatagaaaaccgtttgcaagtggctctcgacttcaactatctg

SEQ ID NO: 8488 - DNA, 483 bp, Unknown
  gut microbiota DNA sequence
ttcatatttcttcttttttcattttctttggtgaccgggaagggacattcaaccctgcccggtctgatgtgccggctttggttgccggaatcagcgtttgattattctactgttgcttccgttttgatatcctcccatggagtgaccgtagcatcactaatctcaatcttatgcagattgattttcagagtatacaaataagactccttacgtttcatgtgtcctgccggtagctcgatgaaagcttccccatggctggcaatgaatttgccggcattagtcgcatctttggacacgatatcgtaatggaaacctatcttgatgtctcctttggcacaacccttgttttgggttagatctgtgccgctcttttctcctaccggaatgagataaaggtactctttatccttgaaaagcggaacggccttctctgctgtcccttgtgacgcttttgtgattcggataccttgtgtacgtgcgtca

SEQ ID NO: 8489 - DNA, 2135 bp, Unknown
  gut microbiota DNA sequence
tttaccgattttttctgcactcaattcagccgaaataccttgctggatatccattaattcatcaagtctggcctgtttaacctcttgtggaatagagtcttcgtatgcttctgcagcataggttccctcttcttcggaatatgcgaaagctcccatccgatcaaaacgtactttgcgcacaaactctttaagctcttcgaagtcttcctcggtttctccgggatgccctaccattaaagttgttcgcaggtgaatgcccggcacttctttacgaaattgttcaatcaatcggtaagtatcctctttgctcacttgccgacgcattaattgcaacatattgtcactgatatgctgaagagcaatatccatatatttacatacattatcgcgttcacgcataacccggaataaatccgttgggaaatgtgccggataggcataatgcaaccgaatccattccacgccagggatatcggaaatacgttcaatcagttccggaagcatttgcttcttataccgatcgattccataataagtcaattcctgtgcgatcacctgaaattctttcacgccttgcgataccaggtatcgtacttcgtccaaaatttcctccatcggtttggagatatggcgtcctgtaataatgggaatggcacaataagaacatttgcggtcacacccttctgaaattttcaggtaagcatagtgctggggagttgtcaatgtccgttcgatatataactcatcatgatagacctttcctaaatcttgtaaaagctccttccaattgaacttgccataaaatttatctacttgcggaatttcaacagccaattccttcagataacgttcggaaagacaacccatcacgaaaagtttctttaaatccccttcttcctttctttcagcaaactccagaatcatatttatggactcctctttggcatcaccaataaagccacacgtattgattactgcaatttctccttgtggattttcagtatcatgggttacgctatatccgacttcttccagttggcgcattaactgttcggagtcaaccaagtttttagagcatcctaaagtgataatatctattctctttcttttcatgcgttctctccaaacaaggaatcaacgaattcatttttacggaatacttgcaggtcttccataccttcacctaacccgatatatttaacaggaatcttgaattgatcggaaataccaatcacaacaccacctttagcggttccgtcaagtttagtgatagccatagcagttacttcggttgccagagtgaattgtttggcttgttcgaatgcattttgtccggtggaaccgtccaataccaataaaacttcatccggtgcatcgggcacgaccttcttcatcacattcttgattttggtcagctcgttcatcaagcccaccttattatgcaggcgaccggctgtatcgattataaccacatctgcgttgttggcaacggcagaactaagagtgtcataagccacagatgcaggatccgctcccattttctgtttgacaacaggaacccctacccgttctccccaaatcattaactgttctacggctgcagcgcggaaagtatcggctgctcccaaataaaccgatttgcctgcttttttgaattgataagccagcttgccgatagttgtagtcttccctactccattcactcccacaaccataattacataaggtttccttgtgatgggtacgtcaaaatcagctacatcatccgagttgttttcggtaagtaaagctgctatttcgtcacgtaatataagattcagttcttgagtattcacatacttatcagccgcagcgcgtttctcgatgcgtttgataatatttaaagttgtttctacacctacgtcagatgtgatcagtacttcttccagattatctaatacttcatcgtctacttttgacttaccagccacagcacgagcaatcttactgaatacgctctctttggttttagataatcctttatctaaagtttccttcttctcctttgaaaaaaaactaaaaaatcccatattgacacttgtttgtataatacatttgctacaaagatataacaaaggattggaaaagtaaaaaaa

SEQ ID NO: 8490 - DNA, 350 bp, Unknown
  gut microbiota DNA sequence
aagggtctctcgcgtgtaatgagttccgctaaggatgagcttactcaaaaacatggcagcgataaaagctccgagtccattgaaagactgcgccagattcaatcggcggggagctgtttcgggggctcctaaaaccgtcacatacggattggcagccgtctccagaaagcacattcccgtagcgataataaagaagatacagaggtaagcccaatattcttttaaaatggcggcaggaaagaaaagcaggcctccgattgctgctaataccagtccgaaaataattcccgccttatagctgtaacgtttcataaacatcgctatggggatggggaaaataaaataagcca

SEQ ID NO: 8491 - DNA, 1001 bp, Unknown
  gut microbiota DNA sequence
gtcgctgaatatcctgtattctgctggtcatgcccaattaaccattccaattaatccatcctctttaataatctccttttgtaatttccctttgtggtatatccctagtattctttttacatttggttcattttcttgctttccttctatattgtcttcttgtctctttcttcttgttgtctttttctcatctgtaattcgactgtaattttgttatttctttcttctgcatctttttctctcttgcgtgcgcctacgcgcccgcgtgtgatataataatgtgtcccatgtgtaccgttttcgcccgcaatccactcatgataaaaaaatatgttctacaacatcattatccttcagtgttttagcagattctttcaaaaaaacttcgaaaaaatagtttaatatatttggattgtatactaaaagggtgtacttttgcacccgctttccaagagaagaaagccttgcagaattgacatagtgaaaaagcgagattgcgcttaaagaaaagaacaaaaaaacttccgaaaagttttggattataataaataaagttcttatctttgcagtccgattcgcaaagaaaacggcctttgttttttcttttgtgcattctttccctttcgcatagagagcctgagaaatgagtaaaaagaaaaaaataaaaaaaattccgaaaaagtttggtagttaaaaataaagcctttacctttgcacccgcttttgaaacgaaagcagcaagttctttgaaatattgataaacaatacaagtagtacaagtaaaaaaaatagaaccgtcaatacttgtttttagagcagcaatgttcgaagaaacgataggtatttgaataaggtcaataaatttacggcgtcctgaacagagcaaaaaatcatcttaacagatgaaaagatacttttacaatgaagagtttgatcctggctcaggatgaacgctagctacaggcttaacacatgcaagtcgaggggcagcattttagttt

SEQ ID NO: 8492 - DNA, 231153 bp, Unknown
  gut microbiota DNA sequence
tttatttattagtgattgtaacggcatggacataggagaccagatatgaaaaaatgttttaagataattttgagtatttttgttttggtacttacatttgttgctggttttcaaactgctaatttaagaaatgaaggcaaatggaaactagagcaaaagaataatcaaagtggcatagaccttaaattaccaggagaaaatgaaaaaagtatagttactgttgaagaagtagaggcaaagctgaaaggaatagctgaattatcaagttatagtggtgagtatactgtaacttatggtaaagatactgcaagatattggcttgataacatcaaaattttcggaacaacgaattctattgaaataaaagcaagtggtgttgttaaagtcggatatgatatgagcaaaatggttattaatgttgataatgatagtagtaaaatatatattaagttgcctgaaatacagttgaatgataattatgtaatatgggacacagtaacatgttcagaatcaaataatattttgaatcctattgagttttcgcagtatgaggaaatagtagatgaaattgaacgaatgggacttgaagatgttgaatctaagggcatttatgataaagcgtctgaaaatataaaaaatattataaaaggatttttgtcgggatatgaagattatacaattatttacatgtaattgggggttgaatattaagagtagcgctctagtcaattgactagggcgcttttttcttacattcacctgcatcatcacaatcatttttcgcgaaatttacatggccttttatgaaaatcaaattttttgtaaaaaccatttgactgctccgttggagcagtcataggttaaaggagggcctatgaggaatgatttaatgacacttaaagaagtatgcaaggaaacaggagtgacgagaaagattgtgcagacatatgaaaactatggcttggttaaagcaactacaaagaataagtatggttacctgctatatgatgatgctgcagtaaaaaagattaaaaagataagattgtatcaacggtttggatacagattatcagaaattgcaaagcttgaatacatgacagtagatgagcaggtaatgattcttaaagaaaagattaataatatgtatgataatcagtcagaaacggcagaacttattgagatggcagaacaattattggaaaatttgaggtcacattaaggaggatatatagttatgaaagaaaatgaaaaagaaatttttattgatgagatggcagatttaggagatgaatggactattgaagaacttaaaggtacatcttatgaaaaaatgtcattagagagggctataagagaaagaaaatcagctcttgggaaaatggatgggataataggcaccattactttctgataaacattaatttctaatccgccatggacaatttacaattccccataatatgctatcatgatgaaaatttacaaaagtgatttattatgttggaaaaattttaggcatttctgaaatgcaaggatattgaagtttcagttaaaaggtatggaattgatgcactgggagcgatggcacagggattgttatgtttgatgctttcggatttgctatattcagtctgtttaataccagattaattagaattataatgctttgaataataatgctataaaatttttcatataatgatggctcttggaataaaacaattatgcttcggctaaaatataataaaaatagaaattagccgaaaggaagctgacgtatgagttatattaaaagaaatttggatgatatagggtaagtaaaaattgctatattcacaatccccctataatatgctatcataatgaaaatttacaaagtgaggtctatttatgtgggagaaatttaaatccttcctgaagcggaaggatattgaagtttcagttaaaaggtatggtattgatgcactgggggcgatggcgcagggattgttctgttcgttgcttataggaacaattcttaatacattgggaacacagctgcatattggttttcttactaatactgtggcaacagtgagcggtgtcaattatacagttggagggcttgcgtcagcaatgagcggaccggcaatggcagtggcaatcggttatgcactgaaatgccctccacttgtactgttttcacttataactgttggatttgcatctaatgcgcttggcggtgcaggtggtccgcttgcagtatattttgttgccattattgcagcagaagcaggtaagatgatttctaaagaaactaagatagatattcttgttacaccgcttgttactataggtgttggaacaggagtagcggctcttattgcaccggctttgggaaaagcggcaatgaagattggcgaacttattatgcttgcaactaatcttcagcctttccttatgggaattgcagtatcagttcttgttggaattgcacttacacttcctatatcatcagccgcgatatgtgctgcatttggacttactgggcttgcaggaggagcagcagttgcaggctgctgtgcgcagatggttggatttgcagttatgtcatttaaggagaaccgctggggtggacttgtttctcagggaattggtacatctatgcttcagatgggaaatataattaagaatccgaaaatatggattgcaccgatagttacatctgcaattacaggtcctatggcaacatgcctgttcaagctgcagatgaatggcactccggtatcatctggtatgggaacttgcggatttgttggacagattggtgtatattctggttgggtagctgatattgctaatggaacaaagactgcaattacaggatttgactgggctggattgatacttatatcattcattcttccggcagtgatatgtccgcttattaatatgcttcttaaaaagattggctgggttaaagatggagatatgaagctttcttgattgggggaacttaattggagaaactagattggataaaaagataggtttatgttaaaaatagtggcaggacttcaggtatttctaaagactgccactttttatatgcatattaattaaaatgttctttcaattcaccagaaagctttaagacatgctcgatgccatcgtcaacattcgaaacggcttcttcctgctggcggatgctctctgaaatattagatatcattgcagcgttctcttcagaggtagcaacaagcgtctgaatgtctgagttaacgctgtcaaaagctgtcctgacagattcgattaccttatactgttcccttacaagatcgtgtgcaacttctgttgaatcattgattccggtgaggacattgacaagagtgtccatcttggaaacaacatcattagctgattcagcacctgcattcacgcggttagaaacttcatctgtcatacctgaaagaccgttaatgattttgtggatattgtctgcagcttctgaactttgttcagaaagatgacggatttcatctgcaactacagcaaatcctttaccatgttcaccggctcttgcggcttcaattgaggcattaagagaaagaagattagtttgggctgcaattgcattgatttcttcaagaatagaagtaatcttagacatctcgttcataagctcagacatagctcctctggcagagccaacagtttctgccatctccgaaagagtgtttttaacaacatttacttcgttattaccggctctgactgatgtatcaactttttcgaagccagcatcaagctctttggaaagctcataattcttattgatttcatcggttgcatcctgaattttctcagtaacagatatagttgcattggttgtatcgtcaataacggtattcatctgagaagcagcttcatttaccttagttgcctgttcagataagttatcaagaccgtttttacaattttcgatagctgaattaagattaatggctatgtcatttgctgcatgtgagttgttgttaatagtagatagtgtttcttcgctctgagaaaggagatcgcgtcctctgtcaacagctttgtataaaacaacagcaacaaggtcaaaaagaaatacctttgtaaaggcatctactctgtcgtaattagccccatcaataacgaatgggaaaaatatggcacatataagtgcaatattagcaacaggaacagagtaatatataatgtacttcttatcaaaatataatgccatcattgatagaaatacaaaattggcaagaaatgcaactgagttgccgcctaaaacaaaagcatatacaaatgtagcaattgaaggcgtaagattaataagcaaagctttaataaaatgattctgaattaagaacttaccaataccggcagcaataagactggcaagcattatgccgattccgataaatgcacggatattaatcccttctgaaaaaaatgtcataactgataatgcaattgttccaactaaaacaataagatagttgtgtgaatgtaatttatccattagttcctccctaaaaataatattaaattgttcgaaaattaatatagaaataatagcatttttaaatacaaaaatcaataattaacaggttgacattatgttaaatttgaaatatacttcttactaaagcgttgacgagaagagtactatgttacggttctacagagagaagcatatatggtggaagtgctttagaatacggatatgggaaaaccacctccgagcggcctcaatacggcacggtgattccgttataatcataatgagatgttctcctgattgagagaataataagggtggaaccgcggattgaatattcgccccttatacagcaagctgaaaagccactgtataaggggcttttttgcgcgagtagcgatgagaatatacagggaaagtcaacaactgtgcttgcacagggtgtggactttgcatggatattcgaggagcaccgcgacagtgacagagcgaagctctggaacatgagctacgagcgcgagtagcgatgagaatatacagggaaagtcaacaactgtgcttgcacagggtgtggactttgcatggatattcgaggagcaccgcgacagtgacagagcgaagctctggaacatgagctacgagcgcgagtagcgatgagaataggaacaaaaatattaacacaaaaggagatttatcatggttaattttaaggaagatgaaagactgaatactcttaatcattcatgtgcacatgttatggcacaggcagttaagcatttgtatccacatgctaagttctgggttggaccagtagttaaagagggattctattatgatatagaccttggagataatgtaatcaatgacgaagctattgaagctatcgaaaaagagatgaagaaaatctgcaaggaaggcaagaagatatacagaagagaagtttctaaggaagaagcacttgagatgttcaaggatgatatgtataagcttgaccttataagcggtcttgaagatggcaatatcacagtttatgaccagggcgatttcacagacctctgtcgcggacctcatgttgataatactaagctctgcaagaacttcaagcttgttaaatattctggtgtatactggaagggagatgccagcaatcatgtaatgcagagaatatatggtgtatgtttcccaacagcagaggaacttgaagagcatcttaagcttcttgaagaggcaaaggaacgtgaccacagaaagattggcaaggaaatggaacttttcatgtcagatgacttaattggccgtggacttccaatgttcttaccaaagggatatacagtatggcaggagcttgagaattacattaaggacaaggaaagaaagcttggataccttcatgtaatgacaccatgtgttggtacagttaatctttacaagacatcaggtcactgggatcattacaaggaaaacatgttcccggctatggaagttgaaggcgaatcatttgtattaagaccaatgaactgtcctcaccacatgatgatatatgctaacaaaatgcattcttacaaggatcttcctataagaatcggtgagattgcacatgacttcagatttgaggcaagtggaacattaaagggtattgagagaggaagacatttctgccagaatgatgcccaccttttcgtaacaccggagcagattgagtcagaatttgccaaggttgtagaccttatatttgagacatacaaggatttcaatattacagattaccgctgtgttctctcattaagagatccagaggataaggtaaagtatcatgatgatgatgaaatgtggaacaatgctgagaacgcattaagaaaggttcttaatgatatcggaattgagtatacagaggaaatcggagaggctgcattctacggacctaagcttgatgttaatgttaagcctgctatcggtaatgaatatactttatcaacatgccagcttgatttctgtcttccatctaagttcaacttaacatacattgataaagatggacagagaaagacacctgtagttcttcacagagctatccttggttctcttgacagattcatggcttatatacttgaggagacaaagggtaaccttccattatggcttgctcctgtacaggctacaattcttccggttaagaatgaagatgaagagttaaatgcttatgcacatggtctctatgattatcttgcagataatggaatcagagttgagattgatgagagagcagaaaagcttggatacagagtaagagaagctcaggttaagaagattccttaccttattgtacttggtaagaatgaagcagcagatggaactgtaagttacagacttcacggagagcagaagtcaactacagtatctaaggacgaatttgttgcaatgcttaaggatgagattgctactaagaagaataatcctgcagcagctaaataatcagactgaccttacagaaagaagcgtgacaatatgtaatgttttatgtattgtcatgctttttgtttatatttcagaaaacaataggaaaataaatggctagatattactataaaaagaaaaagaagaaattcgtacctaaagatttagcaagtcttaaagaacttaagataaagactgcattaatggagagtattcctgaggatataacacagctgtatcctgaagccagaaatataaagagacattttatacttcatataggggagactaatacaggaaagacacatgatgcactagaaggtttttataatgccggttcaggaatgtatcttgcacctctgagacttcttgcacttgagattcaggagatgagtcttgcaagaggaattaactgttcgttgacgacaggcgaggagaaggatataagagatggtgcaaagcatttatcctgtacagttgagaaaatggatatgagcagacattttgatgtctgtgtaatagatgaggcacagatggtagccgactcagacagaggctgggcgtggacagaggcaattcttggcgtcaatgctgatgttgtacatgtatgcatgtcaccgaatgcaatacatattgttaaaatgcttataaaaatgtgtggagatacgtatacggatataagacataaaaggaattcaagacttattgttgaagaccatgatttcatatttccggatgatatacgggatggagatgctttagtagcattttcacgtagaaaagttcttatgcttgcaacccttctaaagaaggaaggctataaagtaagtgttatatacggttcacttccatacagtgtgcgaaaggcagaggttgccagattcttaaatggagagagcagaattgtagtatgtacagatgctattggaatgggagtaaatcttcctataagaagaataatatttactgagtcgaaaaaattcgatggtaaatccaaaagacttcttaacatgagtgaggttaagcagattgccggaagagcaggaagaaagggcatgtatgaccaggggtatgtcaactcaatagaggacagggatcagataggggaactgcttcatggaagatatgagcagataacaagctgcgttatacagccgccaagaaaagtcctggatatgccatacagcctttcagagatatttaagatatggttaaagacgattgaaaagaaatgcttttcagttgctgacttaaagaacaggattaaacttgctgaatatattgagaaaaagcatggtgagaagattaataaagatcttgaatacagtcttattaacattccatttgacgagaatagcgagaaacttaaatatttgtggcaggatcttgttgatatgacagctgacggtgaaccggtaagcaggatgtggtattatgttgatactgaatctgaagatatagaagccatgaagctggatgaccttgaacagttgtataagaaactggatctgcttaattcatactgtaatgcgcttaatatatcagaatatgatgagcgtatcagaatgcttaaagagaagatatcagaactcatagtaagagaacttactaatggggaattcttcaacaaatgtaaacgctgtggaaagagactggaatggaatcacagatttggtatgtgtgaaaaatgttatgagataaataagctggaaagaatgcgctataaaacagataaatggagatgaaaaggtctacattttgcttttttatgcgaacataagcaattcgaactgacaatatataggggatatgttatatttaatgcaccaaatatatgtttttataaaatgtagacatttttggagtaaattatcgttattaagtgataatacatttataaagtaataattattggaagaggaaaatgctatgagtgaaagtattaaaggtagaattcatcaggtggaaagctttggttcagttgatggaccaggggtaagatatattgtatttcttaagggctgtcatatgagatgcagatattgtcataatcctgagacatggaaagaagaaggcggaacattagagacagcgcaggaagtgttcgataaagcttaccgttacagaaattactggaagaatgggggcggaatcactgtaagtggtggagaggcgcttcttcagatggaatttgtgacagagctttttgaaattgcgaaaaagaatggtgtgcacacaactcttgatacatcaggtaatccttttaagatggagccagaatatctggaaaagtttgacaggctgatggctgttacagacctttttcttcttgatattaaggagattaatgatgagaagcacaaggaccttacaggctggactaataagaatattcttgaccttgcaaagtatctttctgaccatgacaaggatatgtggataagacatgttcttgttccgggagtgacagacgcacaggaagaccttgagcagttgagggattttgttgccagtttaaagactgttaagagatttgaagtgcttccatatcatacacttggagtatttaagtgggaggaattaggaattccgtatacactttctgatgtaatgccacctgataaggaacagattgcaagagctaatgatatattaagaacagcagaatacacaggatatcttgaaaaataagatattggaacagaataaataagcccccggacaagattgtgtctgggggcttaatgtgcttaatgaaattatttgcagactgaccttaaaccgtcattaagaccttcaatatatgaaagagccttttcctttcctgaagcattaagcttcttatagtagcctaataatcttgtctcattgtcggataaagattgaacctgaatcatatttctgacatcagatttcatcattatgtaatccatgctcgcatctaatatactgcttaatttcataagagatgagacacttggaagatgccttccttgttcgtatgcacttattgtttcctgggcaactccaagttcagtgcttaatcttacctgtgttatatgtttttcctcacgtaattcacggattctgttacgatattcctgcatctggtattcctccatagttcatctgattgcaaatccactataagaaaaataacattttataagcctgatattagtggctagagtggtaaaatgtggtaattatataggttgacatggtaataaacggtaaaaaagatatatggtaaaatatatgacattgtgttatcattctaaatagcagcgttgctgttgtagagaggaaacaggggtatacaattatgagaagaaaaaatgcagctgtattaatgacagcagtcattattggaggactgcttacaagttgtggcagtgcctacaataatactaatgggaagaattctgacaatactgtagagacacagactacagcaagaaccgttgtcaatggagaaaccaaaactgatggtaataatgttaagacagcagataaagaaaccagggattttacacaggaagtaaccagtgaagagaataacctgacagatagtgatattgctggtaatacagaggcatcagaacaacaggcttttgatgatttgtcacaggcagatggttatgagaataattccggacaggaatcagggaaagacagtggttcgggagatgattacaagaatagtgatggggaatcatatggtgacggagattcaccggataatagcgaagaaacagatattccgtctgcaagtgaagatgttaattctgattataacctgcttgcgcgtgcacagattaacacagttacatatagcgcatatgccaatgaagttttaagacttgttaatattgagagagccaatgctggtgcagctccacttgtattagatgaagcgttgtgtaatgcagctaatatgagagcaattgagatggactattcgggaaatttcagtcacacaagaccggatggaagagactgcgttactgttttttcattttgtgaaatcagtttttatacatgtggtgaaaatatcgcagcagggtatccgactccggcagcagttgttgagggctggatgaattcaacggggcataaagctaatatattaaatgtagcatttacaaagatgggacttggatacagtacaggaggaggcggagagtacggccattactgggcacaggaatttgctggataaaaagaatatgtaaaatagaaagagccatgccggataatccggtatggctctttctgagaaggaaattatatgagaaaaattaagatatagctttcttaatagcgttgaatgattccttgcttatatcatgttcgatacggcaggcatcttcttcagcaaccttaggatcaacaccaagtcttatgagccatgatgtaaggagctggtgacgctcatatatcatctcagcaatctctttaccggattctgtaagatatatgtaaccttctttagttaccgttatatgattagactccctcagattcttcattgcaatactgacgcttgatttcttgaaacctaactcattggcaacatctattgaacgaaccacaggaagctttttgcttaacattaatattgactcaagatagttttctgctgattcatgaataactgacataattatatcccccgattacttataacgatattgatatatgaattataacacgcatgtatatttaatgcaaatgtgctgaatataaattaatcataaaatttatcataatacttggtaaaatatggatgtaaagccttatcagtgttgcaaataaactgaatgcagtttaaaatgtagaaagtgtatgtaagatattattatgttagagggtgtttttttgaatataagcaatatagaatggatagaaaaactgaattgccttacagacttgcatgtacatcttgatggttcactgtcacttgaatctgtaagacatctttgtggtatgcagaatatagaaacaggtgatgatgcagaattgtcagcgaagctgagtgtgtcatcagattgtaagaatcttaatgaataccttgaaaagttcgaatttccacttcagcttttgcagacgcgtgaggctgttaaatatagtgtgtgtcagcttgttaaggagcaggaagaacagggggtaatatacagcgagataagatttgcaccacagcttcatacaagaaaaggattgtcacagcaggagattgttgaagcagcatgtgagggacttgatgaatcaagaaagtactggaagtcatattcctgtcacaatcttatattatgttgtatgcgttcggatgataataaggatgctaatatggaaacagtaagacttgctgcattatatgccgaaatgggaagaggtgttgtggcagcagaccttgcaggtgcagaaggactttatgcaacagatacatttgcagatgtattcagggatgcagtgcagaaaggagtgccgtttactattcacgcaggcgaggcagccggagcagaaagtgttgaatgtgcgttgaattttcaggctgtaagaataggacatggcgtaagatgtacagagaatcctttagttatgcaggaacttgcagacagaggtgttgtgttggaattatgtcccacaagcaatctgaacactaaaatatacgagacaataggggattatccgatacagcagcttatgaataaggggataagagttactgttaatacggataatatgatggtttctaacactacagaggcgagggaacttgcattggttgcagatacattcaatatggagaagaaagatgttaagcagctgataatgaatggtgttgaagctgcatttacaacagagggaataaaaaaccgcttaagggcaagagtggagacacagtttgccaaagtggctggaatcagaggttagggtatgaatgaagttaatgaattatttactaaagaaaatgtagaaaagatatatgttccggatattgttaaggatgatctgctaagtattatagaagaaaagcttaagaaagcaggattctattacagggttgcatacagggtgaaagctcctgattcaatgcttgataaacttatattaaaggattacagaagaccggggacagagaatcaggataaaaagatgcaggatcttataggaataagaattattctgtattatgcggatgatgttgaaattgttaagaattttcttgatacaatattctctatgccgggcgtgtggaatacaacagaggctaatgaatatgagttcagggcaatgaagattaacggcatattcaagctgccgggatatcttagcaagaccattgttaatccggagcttggagattatgtggatgatacatttgagatacaggtaagaactaattcttttgagggctggcatgagattgaacatgatatgagatataaaggctcagcttttggcacgggtaacgaagcacttgcaagaaagatgaacagtattcttgcgacactggagttatgtgatgattcagttgtagggctgattgaagatttaggacatcagcattacaaagacagaaaatggaactatatgttaaggtgccattacagactgaagtttacaagagaaccgctgcatccatatattgaagagatatttgatgaagatacagaacttgccaagaagttttataaatttaaaagagaaccgttactaagacagttgtgggataatacaggagataaaggtccggagattactgttaataatattgttaagatagttaatcagataggacctgaggatgagagactcaaagaagcatttgcaaggatagaacatgagaagaaacaggagacagaaagcgttgccaagagaagaaggtttgagccgtttaaacagcttggttcttatatggtattcaaggctgatacatatatcgacttaagcaatcttgcaatgcctgatgctttcagaaaagccacagggtacatatattcatgggttaagtcaagatatgaggatgtattcacagatttacctgagagtgcagaaacttatgttaatgcagagcctggatattcagttaatctttcgtatgatgcagaaaatgtgtatttttctgaaaaaactacacatcttgatactaagataccaacaagagtatggatatctgaagcggttatatgcagggaaggtgacagactcaaattcacggtatctaacagatatgcagagccgtcagacagatacagagataatgaaaatgttctgttctcaagacctaatttctttggagagatcgcagacaatataggaattgttgatgtggaaagaatgagggagtctgtaagatatgttgaggacagcaaggattacgatgatcttacaacattgattgcagatgaagaaagaacattccctgttatagtatttatggcaagtgatggcagatggcttgataaatttgatatgaattattttgcttatcttgtgggttattatgcgcatatcaagatgataagaagcccttatgaatcacggaaatttgctaaggattacggccttaagatagatgaatgcgctgattctataacagtattttatccgggcagagagccttatacaagctataagacagatatattccatacaacatttgaagttattaaggttgaaaagagaaaatactggaatgagaatggctgcagggcatacagaagaaagcttgtttcagaaataagagagaataacgtactttagtaagtgttatattaggagagaacggaatggataaatgtgtcctgatagttgatgataacgattttaacagggaacttgtaaaagatattcttgaagatgaggatataacagtttatgaggcagaagatggcagttcggcgattgaactgcttgaaagtgaacaggcggacgacatagatgtagttcttatggacatgagaatgccgggaatggatggcatagagaccactaagattataaggactaagaatggaaaatgtacagaagtgccaataattgcaatgacagcagatggttttgaaacagatataggtatgctgcaaaaggcaggcatgaacggacttatatctaagcctgtggatgtgaatacattggtagaacatataacaaaactggcagggtggtaaacactctgccagttttgcatgtatattatcttgattcacccataaagaagagcgcaactgttccgggaccggaatgcgttccgattgttggacatatataattaatccatatattatctatgccaaatctttctttaacaagacctgctacgaactgtgcatcttgtaagcagtcaccatgactgatgaatacaacatcattcttatctctgtatgaaccaatatgttcctccatacggtcaactaaagcaataagtgatttctttctgccacggacttttcctatattaataagcctgccgtcattatttacatgaaggattggcttgatgttggcaagcgtaccaataatggcagtagtcttagaaacacgaccgcctctgtataagtggttaaggtcatcaaccgtaaaattatgtactacattaagcttatgattgttgacaaaatctattatttcgtccatggattttcctgatttcttcatctcaacagctttatacacgataagaccttcacccattgaagcagctaatgaatctactacaacgattcttgctcccggatgttcttccataacttcatttgcagctatgcaggcattattgtaactgcttgaaagtgcagatgaaaatgcaatgtgaagaatatcaaaaccctcattgacacgcttttcaaatattgtcttacaatcctgcggattacatgccatagttgttggcatctcgccattacgcatgcggtcaaagaattccttctcaggcataatgttatctgttccgtagattacttcaccaaatgcataaaaaagagtgtggatatcaatgttgttttctttaacataacttgcaggtaaatcagcagttgtgtcagttgatataagaaaatctttcataaatgtcagatcctttcttgatttattttctgtattataatatcattaattaagtgatattccaagatataagattaattgcattgtaataaattttgcgaataaattttaataatggggttgacatatattgtttaggatgatatcatacaatagttgcaaagcaaagcagagtatccactctcacctcagcgcatagggcgactcgggttgatatttaagaattacacataatatatgattgtgttttgattaaagaaagtggatagctgagctattcactttaattttttatatgggggtgtaccgctattaacgagttaatgattaacgaacagatcagatgcaaagaggttcgtgttattggagaagaaggacagcagcttggagttatggcattaagagatgctttaaacatggctaaggatgcaggagtagatttggtaatggtttcgccatcagctaatccacctgtatgcagaattgtagattatggcaagttcaagtacgaacagctccgcagggaaaaggaagctaagaagaaacagaagacagtagaagttaaggaagttcgtttatcacctaacatcgatgtcaatgaccttaacactaagtgtaactcagcaagaaagttcattgagaaaggtaacaaggttaaagtatcattaagattcagaggaagagaaatggctcatatcgactctactaagcatatattagaggattttgcagaaaagcttagcgatatagctgtaattgagaaggctcctaagatggaaggcaggagcatgatgatgtttttaactgaaaaacgttaaaataaataacaactaacagacatttttaggaggattattatgccaaaggtaaagacaaaaagagcagctgcaaagcgttttaaagtaactggaacaggtaagttaaagagaatgaaggcatacaagagccatattcttacaaagaagtcagctaagagaaagagaaatcttagacaggcagctatgactgacgcaactaatgttaagacaatgaagaagattatgccttatctctaagattaatggtataacaacatttatttagagatatagtttaaggaggaatttataaaatggcaagaattaaaggcggattaaacgcaaagaagaagcataacagagtattaaagctcgctaagggttatagaggagcaagatctaagcagtacagagttgctaagcagtcagttatgagagctcttacagagagttataagggcagaaagcagaagaagagacagttcagacagttatggattgccagaatcaatgctgctgcaagaattaacggactttcatacagcaagttcatgtatggtcttaagttagctaatatcgatcttaacagaaaggtattatctgagatggctgttaacgatgcagaaggatttgctaagctcgcagaggttgctaagtctaagcttgcataattgattatatattatatatcatagagataataggctgtcgtgaaagcggcagtcttttctttttaaaatgtatgatatttctgtgaactaatatgaacagatatggataaaatctcttttatgtgatatagtatgaaagtcaattttttacttctgtataaagaagtgagagcggaggtttattgtgagaaaaagttttttaagaaaagcatcaatagttttattatcagcaacaatgcttatggcaactgcatgtaataaagagattgaagtaaaatacgattataatgttaatgattatgtacagcttgggaaatatgaggatatagctgtaacagttgataaaacatctatagagaatcagcttgttgatgataagattgctgaagatatagagaataatactacttattcagaagtcagcagaggtgctgttgatggagatcagatactggttacttatgttgctacaagttcgggttcacagtcaacagggctgtctaatacagatggtgttacaatgatacttggcaaagataaacttggacttgatatagaagagcttgatgaagcactctatggaatgaaggctggagagactaaggttatggtaatcgacttgccggaaacatatagcaataccgtatatgcaggaactaaagtagtgtttgagcttaccgtgcagacggtttcacagcctaatgtgccaatgcttactaatgcatatgttaaggaaacatttggatatgatacaatcgaagaatatagagcttctgttaaagattcattagcatctacaatcgattctaaggttgatgatgagattcagaaacaggttctttcaacacttcaggatacatgtaaggtaagtggttatccagatacactgctcagtacattacgagacagatatgaccagtctgtcggattctatgctgattttactaaccagtcaaaggaagagtattgccagcagttatatggaatgtcatatgatgatttcattaagaagtcagcagcacagcagcttattatggaagcaatcgtgaaagatcagaagttctctatgagagaatatgattacaagggcgatcttgatgaattcgcaggagacaatggatattctgatgagaatgcatttgttgagaaattcggaaaagatagtgtagttaaggctatgcttgtgcagaaggcacaggattatgttattgagcatgccaatattgcgtataagtaagaaggaattcaggtagtgtgtgggaaccggcagcatattattgtgcgggtcctcatggcggctgcacctagtgggagtaaatgccgctctatacagagtttattacggtgagagaaaacaaacgcgcttcgcttgaacgagttttctctcaccgctcttttgtatagagcggcataactcccacacggttcgcgccttaaatcggactcgcacaataatatgctgccggtttcaatctacgttaattctgtcttgccttgcttatgccttcggcatgttgcaaggcgggttgttgatgtgtaaccggggtggctatgaaatgtggtgggataaaaaaatccatcttgcttatgcctttggcatgttgcaagatggatttttttactttgtgcctgttgagccgaagccgccttcgcctctttctgtgtcgtcaagctcttctacttcgttgaatgatgctgtgatgtatggtgctaagactatctgagcgattctgtcttttggttctatggttacaggtttatctgaatggttgtggagggctactatgatttcacctctgtagtcagaatctattacacctactttgttggctggggcaagaccttttttgcatgccattccgcttcttgcatagatgaggcctacgagtcctgttggtatctccattgctattcctgttttgatgaattcagttgtgcctggcataactgttacagcttcggacattcctgagtagagatctgctccggctgagaattctgttccgtatgttgggatacaggcgttaggatttaatttcttaatattaactttctgtgacattgtgtaaactcctttatattattaatcgtacagaagtacgatattacctgattcgagtgattcttttacaaggattgtcctctggtttgatgaacctttgaactgaagcatcatatctttcttgtcttcttcatatttgccgtcaactatgacgtcaatgtattgaagcatttctttagtttctttccattcgttgcacattttttcaacaatatctttgtcaaacagatatcctgtaaagcaccatatactcaggtcaggatatattctgcgtacttccctcagcaatggaaggagtccctgctggttgctgtgttcaaatggttcacctcctagaagtgtgagacctgtaacatagtctggggcaagggaatcaatgatttctttgattgtatcgtctgtgaagtccctgccataattaaaatcccatgcaatttcgttaaaacaacctttgcatcggtgtgtgcatccacttacaaaaagagatgtacgcacccctggtccgttagcaatatcgcaggtttttatctcggcataatgcataatataaaccctctttctaaaagttgcaataaatctgtattattagctgataatgacatcttatcacatgaattacagaattatgaatgctatattaagactatagcaaatgatttaaatctgttgtacaattatagcagatttgctcgtgacaaacaatggagggtacatataatgaaaatttatttttacaagctttacaggtatgacagattacaggaaccggcaggcatagcacttccttttaaggaaggagagttaaagactgctgacaggatagctattacacaggatggcagaaaatgtatggttcagccaaaggttacatcgaaacatgcagatggaagcataaggtacctgtatgtggattttcttgctgatattccggctaataagggcgcagtgcttgaatttgaaaaagagtctgatggaagctgtgaagaaaagggagtatctgttactcagactgggcagggactgtgtgttgacacaggctgtgttacatttacagtaaagaataattcccagaatatatttgaaacacttgatgatggaagaaaacattataccgctcagaattttgaaggaccatatctgaaagacgatatgggaaaatacgacattaatattggtgagtggaagattatagatgcaggtcctgtaaaatgtgtaatcagggctaaaggaagtaacattcttaataataaaaaagttgattttgagataacacttacatcatatgcagctaagtcatggattgatgtttcatacagaattattaatacgacttatgatgagcttcatattaaatcactggtattttatgcaaaaccggatgagacaatcactgcaagtgatgatttgtttgatatgcacattaatatggataatgattctaccggatgtggagatgtacttacggataattctaaagagaatggacctgtgtatcacacaagaggaaccggggaattagagatgatatctggcaaagcacctgtttccaatgtaagaacacttgttggaagctctaattataagactgatttctatattggaagagatggagtgcaggttaataagattatcgatgatgcatatcttgtaaaggaagcaaatgaacattttgcagaggtattctatggtacatttcttgcagattatactgatggaaatgatggattgtgtataactgtatatcaggcacagcagaattatccgaaggcagttaaggcatatgacggcggagtagctgttatgcttgttccagaggatattggaaatgttgttatgcagtctggtatggcaaaggaacagagattcctgatgcatttccatgaaccggatatgcagatgtgggagcttgataacagaagtacaatataccagatgcctgacagaccatgcatagcaccagaggaattcaagaaggcagaagtgtgtatggatgtattccctgaacatcttgtggatgaagttgaaatcgcacttattgcaagggctgataatcattcaagatgctacggcatgctgaattggggcgattctattgatatgggatatactttacagggaagaggtggcggaaaacctgtatggagtaataatgaatatgattatccgcattcatgtgctcttatgtatgcaagaactggaatcagaagattccttgactatttaatagtttcagcaaagcatcagatggatgttgatgtatgccattacagcaagaatccattaagaataggtggacagtgggaacatacagcaggtcattgtaagaatggaataatggtatgctcacatgaatgggttgaaggagtgattgattactatcattttacaggtgatgagagaggtcttgagacagctataagtataggtgataacatattaagacttctggatacaccaatgtatgcaaaaccgggagaagccaatgcgagagaaactggctgggctttacgtgcacttgttgcattatatgtggagacaagagatgaaaaatggcttgcaaaatgtgagtggattattgacagctttaagatatgggaagaggagtatggcaactggcttgctccatatacggacaatactcttataagagtaggatttatgatatcagtagctgcaggaagcgtaatgagatattacagggtatttccaagagaagatattaagcagatgcttataagagcaattgatgatattgtagagaattgtactcttgacaatggtttgttctattataaggagcttccttcactttcaaggaatggaaataacacacttcttctggaatcactggcaattgcctatgaacttacaggtgataagaaatatcttgagtatggtttcaaaacatttgaaactaatattaataacacaggaagagcaggaattggttctaaaaaggttatagatgatgctgttattgtttctggtgacagtacgaaaggatttgcacagagttttataccacttgttacatattataaggcacttggagatacaggattaattaataatgtaaagctgtattaatagtttattacggtgagagaaagcaaacacgcttcgttagggcgggctttctctcactgctttttttgtatatagcagcattaacgccctcacagcttggaaaagtcgcagatatttactggtttttttatgtaatatatagtataatctttcaaaagtgtttgtaattgacggaaaggtggttttttatgagaatcggaataagagcacatgatgtagcatacgctccattagaggagcttatacctaatatacatgcacagggttttcactgtatgcatatagcattaagtaagtctattaaggagtttaagccgggcgtggagactatgacaccgggacttgccatgtatataaaagagttatgtacagagaataaggttgatgttgcagtacttggctgttatcttaacctttgcaatcctaatcctgagaagcataaggagattgttgagaagtataaggcacatataagatttgcaagtattcttggctgtggagttgttggtactgagactggtgcggttaatgaggaatacaagtatgagccggctaatcatagtgaggaagcacttcagtgctttattgataatttaagaccaatagttaaatatgctgagcagtttggtgtcattgtagcaattgagcctgtatggaagcacattgtatacactgtcgaacgtgcaagaaaggtgcttgacgctattgattcacctaatcttcagattatatttgacccggttaacctgttatgtgttgataatcttgcacagcaggatgagattattgataaagcatttgacctgttattaaaggatattgctgttgttcactgcaaggattatattgttgaaggcagtgagcttaagtcagtggcagcaggtacaggaaagggtaatccggtgaccggaggaggtcttaattatccacttctgttaaagaagattaaggagcataagccatatgtacactgcacactggaaaatactgttcctgagaatgcagtggctacaagagaatttatggaaagaacatatgccagtgtataaataatgggcttaagaaaactataacgctggacaattaccagagaatggaggcacgtatgccagagaatatagagttaccaggcgcaagccataacaaaactaatcaggttgaaagagcggtggatacaccagcagattttacaagtcctgaggaattatataaggatcttattgcagctataaagaaataccacccatctacagatctgtctgatattgagaaggcatacgagaccgcaagaaaggcacatgagggacagttcagaaaatcgggtgagccatatataatccaccctttatgtgttgctatcattctggctgaattagagcttgataaggagtcaattattgcaggtcttcttcatgatgttgttgaagatacagttatgacaactgaagatgttgcaaaagaatttggtgatgaggtagcactgttagtagatggtgtaacaaagctgacacagctcaattaccagcatgataagattgaggtccaggcagaaaaccttagaaaaatgttccttgcaatggcaaaggatataagagttatccttataaagcttgccgacagactgcataatatgcgtacaatgcagtatcagtcgccggcaaagcagattgagaaatcaagagagacaatggaaatatatgccccaattgctcataggctgggtatttccaagattaaggtagagcttgatgatttatcaatgaaatatctgatgcctgatgtatataatgatcttgttgaacaggtcaacttaaacagaccgggcagagaagcatttataaagagcataattaaagaagtcggcatgcatataagcaatgccggtattgaggcagagatagacggaagagttaagcattttttctcaatctacagaaaaatggttaaccagaataagacgcttgaccagatatatgacatatttgcagtaagaatcaaggttgacactgtaaaagactgttatgcggcacttggtgtaatacacgaaatgtataagcctattccgggacgtttcaaggattatattgcaatgcctaagcctaataattaccagtcgcttcatacaacacttattgcatctaatggacagccgtttgagatacagataagaacttacgaaatgcataagattgctgagtatggtattgcagcccactggaaatataaagagggaaagacaggtgagaaggacaaccagagtgaggaagcaaagcttagctggttaagacagattcttgaatggcagaaggaaatgtctgataacaaggaattcttatcatcaatcaagaatgaccttaaccttttctcagacagcgtatactgctttacaccttcgggtgatgtcaagaaccttcctgcaggctcatgccctatagattttgcgtacagtatccacagtgctgtaggtaataagatggtaggagcaagagttaatggaaagcttgttaatattgattatattattaagaatggtgacagaattgagattataacatcgcagaattccaaaggaccaagccgtgactggctttcaattgtaaagagcacacaggcgaagaataagattaaccagtggtttaagcaggagttaaaggaagataatatcattaagggcaaggaaatggttgctaactactgtaagactaaaggaattgttctttctgatattaccaagcctgaatatgttgaaaaatgtcttaacaaatatggctttaaagactgggattctattcttgcagccgttggacatggtgcacttaaagagagtcagatagtaaacaggcttaatgaggagcatttaaagaccaagaaggcagaagttacagacaaagatgtgcttgaggaaatcgttgccgctgagtctaaggaaaaggcaaagaagaaggaaggcaagggtggaattgtcgttaagggaatccatgatgttgctgtcagattttcaaagtgctgtaatccggtacctggtgatgagattgtcggattcgttacaagaggaagaggtatatcaattcacagaacagactgtgttaatataatcaacttcccagctaatgaacgtgctcgtcttatagaggctgaatgggagcagggacagacagcaggcgatacctatgaggttgaaatcaatatatttgccaacaacagaaccggacttattgttgatatatcaaggatgttcacagaagcagagattgatgtaaagtctatgaactgccgtcttaataagaaagaatttgctaccataagtgtcggttttgatattcatggaaaggaagagcttaacagaattatagataaattaagaaagatagacggagttactgatataacaagaactgccggctaagaaaggtttgcagattatgattaagatagaatcaagagtattgggaccggtagctactaactgttatcttataattaacttagataacaacgagagcataattgttgacccggcagattcaccagagtctatatatgatatggttgtgcgttcagcaagcaagccacaggcaatacttcttacacatggacattttgaccatataggtgctgctaatgaagtgcgtgagcattatggaattaagatatatgcatcatgtgatgaggaaaagcttcttgcttcaccggcaagaaacctgtcgaatgcatacggcatgagtcttaaagttacagcagatgtacttcataatgatggggatattcttgaacttgcaggacttaagataaaggcaatacatacaccgggacatacagcaggcggaacatgctattatattgaatcagacaagacacttatgtcaggtgatacactttttgccggttcagtaggaagaacagattatcctacagcaagctctgctgcaatgatggagtcgcttcatgacaagctctgcaagcttcctgatgatacagatgtatatcctggacatggagagttcacaacgattggatatgaaaagcagaacaatccgtttatgtgatgcccgcaagagaaaaggaagcaacgcgaagcgttatttacttttcgcggggcatcaacgagcaaacagcctgcgaagcaggcggagaagcacgatagtgcgggtttgcgagtatggaatcagcaggcgaaaagaaactgacgcgaaaaggaagcaacgatgatatatattaagattgataatgatgtattttatgatgatgcggttgtgcttgtacgttcattttatccaagaactgaggttatggcacttaaggcagattccaagccggaagagaatgatgagattctttcaatagaagttcctgatatcacagggcttgataagaagaatgcccatgaagtgtttaaggacagcttatataagaagctttcagaaaagacaggcaagaagcttccgtggggatatcttacaggagtaaggccaagtaagattgcgtatacaatgcttgaagaaggtgcaacagaagaacagattaagaaacattttatggacaagcattatgcgagtgaggaaaaggcagaccttgcacttacagtagcaaggaaagagttagatatacttacggatatggattataagacaggctatagcctgtatattgggattccattctgcccaagtatatgcctgtactgttcattttcatcatatgcacttggtgcgtacaaagactatgtagataattatgttgatgcacttattaaggagataagatatgtcgctgaatccatgaaaggcagaagactggatacagtgtacatgggtggcggaacacctacaactttgagtgcagcacagttagataaagtactgacagtggttgaagaagcttttgacttgagcgcatgccgcgagcttactgtagaagccggcagaccggacagcgtgacaccggataaattcaaggttcttaaagctcataatgtgggaagaatatctattaatccgcagacaatgaaccagaaaacacttgatttaatcggaagaaagcatacggttgaagatattaagaatgcttatgcaatggcaagagaagcaggacttgataatatcaacatggatatgattcttggacttccgggagagggtgtagacgaggtttaccatacacttaatgaaattaaggcgatgaggccggagagtcttaccgttcattcacttgcaattaagagagcttcaagacttaatatattgcgtcagcagtacacagagctttcaatcgagaacacagacagtattatcgcgatgactgagcagacagcaagagatctcaacatgcagccttattatatgtaccgccagaagaatatggcaggtaattttgagaatgttggctatgcagtcccgggacttgaatgtatatataatattcttattatggaagagaagcagacgataattgcgtgcggcgcaggtgcttcaactaaggttgtgttccataatgagtcagatgataatcactcagtaaggattgagagaattgagaatgttaaggatgtcagaagctatgtcgagagaattgatgagatgattgagagaaagcggaagttctttgaggagaatgagttttgataaatggaatggattgactggcatggggaatgtgataagcataggtaatcagggctttgatagtataagagagaacaattacttttttatagataaaagcagtctcattaaagaatggtgggattctggtgatgttgttactctgataatacgccctcgcaggtttggcaaaacgcttaatatgagtatgcttaattgttttttctctagtaaatatgctggaaggtcagacttgttcaaaggcttatcaatatgggatgattccagttacagagatatacagggaacttatcctgtcatatatctcagttttgctgatgttaagcagacaagctatgccgaggcagtttctaagattaagagcataatattggaaatgtactcacagtatgaaagaatgattgataaggatgctttgacggacagtcagagacagctgttatcaacaattaaggttggaatggatgatattgcagcccagaattcattaaaaatattatcttctgtacttgcagagacaacaggaaagaaagtcataatattattagatgaatatgatactcctatgcaggaggcttatcttgacggttattgggatgaattcacagcatttataagaggattctttaatgcagcatttaagacaaatacgtatcttgagagggctatgctcacaggtgttacaagagtttcaaaagaatcagcattttcagatctgaataatcttgtggttgtcacaacgacatctgacagatacagtacatgcttcggattcacacagcaggaagtatatgcggcacttgacagttttaatctgggtgagcagaaagataatgtcaagaaatggtatgacggtttcacatttggcagacgcaaagatatatataatccatggtcaataacgaattatctaaaagaacagaagtttattccgtattgggcacttacaagttctaatagtatgataagcagactgatacagtcggcatcgatagacatgaagatggatatggaaactctccttaatggtggagaaataaccgtttgctttgacgagcagatagtattcagccagcttgaaaatgatgagaatgcagtctggagtctgatggttgccagtggatatcttaaagtatgcgaagttgaatacagaggcatgatgggtaaaccatggtatcatcttgctgttactaacatggaaacactcagcatgtttacaggtatgtttacaggatggtttgctgacaaaagcactaattataacagctttgtcaaagcatttatcagtgggaatgtaaaagaaatgaatatatacatgaatgatgttgctttatcgacaataagtaattttgattcaggtatgcatccttcatcagtcagtgaacctgagcgtttttaccatggtttagtccttggattattgtctgaattgtatgatacttacgaagtgaaatcaaacagagaaagcggatatggaagatatgatgttatggtgattcctaagattgataagcagaaagatgctatgattctggaattcaaggtatgtgatatcgacacagaaggtacgcttgaagatactgcggaggcggcattgcaacagattaaagaaagacagtacgatgctgaactgatagcgagaggtatagacagaaaacatataagacattatggttttgctttccaaggcaaaaaggtgttaataaaggaacaataatagaaagtccttataatgatatcgtcaaagtgatatctttataaggacttaatttaatattggggcaggttttgtcgtctttatatatgggaaaatgtgtcgcaaaggctgcagaaggcatgatttgcaaagcccactaattagttataattcgtataatgtgtaggtcttttttgctacgaaatggagctggatgagttgaaaaacccactaattaagagcaaagttagaacatagtaggtgtttaccctgtaatatgtgtgtataataaaaatgaaggggaagaaaagacctactcaatgaaagattgatggagattgagtaggtctattagcaggagcatgagggataagtggtgttaaaagacctacgaaagggcatatattgggaagttgagtaggtttaaagtggaataacaagagtttatagagcagattacaaaatatgcaggtggttcttgatgatatggtttctgaaatacttggatatgtaagacagaacaacagtggaaatacatatcaagatactttagaaatatgggagaaaataaatatgggagaaaagaacataggtggttatgatgaaaattataaatatgacagtcttgcggttaattatcttgaaggaaggatattaaaatccaaatatcttattccacacatctcatcgggagataaagtgcctaatcttgatggctctatagaattgtgtgaagatgcggtaaataagataaatccaattgcaaaatttgaggtgcaggtaaaatccctgaatcatgattataacaatagtaatatcagagataatacacaatatccatataaatactcctgtgaaacaaaatgtgtaaatgttgtgctgcaggggattacactgaatcctgttcttttaatacttgtggactctaaaaatgaacatatatactggaagtatatgaatgagcgttattgtcttgaacttgatgttgactgccagaaagaaaagacaatatatttcagtgatgaggacgaagtaacagatatagatgaatggggagaaaaccttcgcagcatatataagtcgtataaatataaccttaagagtagtgactgctttttattaccagaagaagagagaacagtaccggaagaaattcagaaaatgtcagattatataaatggattgcttgataatgaattatggtttataaaaaagagtttatttcctcagatgtggaagcttggaatagcatattttgatggtaagaatactgatttttcatgtcttggcttctatataataaaaaaaggaaaaaatgatgtatttataaaacagtttaagaacgaatgggattattttgtaagtataaaatatggaggaagttattcgctggaagacattgtcaaggaaacattaaagaactggatagatttattctttgaaaatgagcattatccattagaaataatgccagatgaagtcctgatagaaatattattcgaaaagatagataatgctgttgcagaagcacgcatgggggataaagacaaagtacatgtcaagctggcactggaggaagataaaattacaatatcagaagcacgtgaaataattaataaatataattgcagtccaatgttgtgcaattccattatatcaatgctcgaggaaagagggtgttcagagataaaaagaccttggagaacgctcgtggattatcatatatcaaaatgtactgacaactgcatcagttatgagccagatgataaccgtgacagcaatgacatatataatatgacaacatttataaaaagatacatgaacttctttaataaatgtaaaaaatttatgggcagattgtcagcacctttatttgatataagacagggcaggcatgtaataattctagatgacgatatggaagggtatctggggattgcagaagggtcagatgactattgcgttgaagtttatacgagaaaagaaaaatgtgaattatacaattccattcaggaatcatggcatacatgtgattcccagtttggaaaaatatgtaggggaacagcctgtaagaacgattattcatggtataagctgtggagggttatgaataggagattatgctatgattatataggtgttgatactgataaggatatgacggatgattataacaggtgttgagaataaggaaaagtattattatgtaaaacattgacgaatatagtcaaaggtgatagaatattgagcggtgtattttgccctaggctaatatatagttacggttgcaaaacatctggcattgaaagtgccataaggataattgatagaaaaaagcttaccaggataaatcgttgctttgtcacgtttattcttatagtggtcatatgtagatagttaatctgccagcattgctgacagaatggcgaagcttaccaattttttaggattaatgaatccagaaaggaaagttattatgtggtatgcggttcaggtagagactggaaaagagagtgtcataaaagactactgctctaaattagtagatagaacaacgtataacgatatatttgtactcagattcaataaggttaagaaattctatgggaagtggcatcaggagagcaaagtaatgtttccaggatacatattcatagacactgacacaccagaacaggtatatgaggctctgaaaaatgtgcctgcattcacaaacctgctcggaagagacaaggacagcttcgtgccaattgaaagaagcaaggaagagctattcaggaaaatggtcaatgacaattacgaaatagctatgtcctgcggactgattgatggtgacaaggtaactatcacagatggaccattggcaggtaaagaagccatgatctgcaagataaacaggcacaaaagaaccgcaaccctgaatgtggagatgtttggggacaaggttggggtgactgttggactggaggttgtggagaaaagaattagtaaattcagtttgtaagagaaatgtatttcaattcttgggattactgggagtaaggacaggggctgatatgaacttatcaaaaatgtagttgtggctacaaagaaaagttgataagggcgaaatgttagataaagagtatctgctgcgtgggtgtagtgggggcttttgatgttaggagaatcagctgagctatccagaataatctggatatttgatatggactggttgtccaaaagataaagaggagaaattgaaatgattattacaaagacaccattccgcatgtcattttttggcggcggtaccgatatggagagtttctttaaagaaaacagaggagccgttatctccacaacttttgataagtattgctatgtgaatgtacgtcatttgcctcgattctttgattacagtacagagttgtcttattcaaagacagagcgtgtgactgatatagaggctatccagcatccggcaattcgtaatgcaatgaaaatgttggacatgcatgaattacgtttgacatacgaagctgatcttccagctcgttcagggttaggaactagcagttcttttgctgttggtatgctgaacgcattttatgcgttaaagggaaaatatgcagataagaagaagcttgcagatgaggctatctatttagagagaattctatgtgatgaagccggtggttggcaagatcagattgcggcatcttttggtggctttaacaggattaacttcaatgctgatggctatgaggttcttcctattattatcagcccagagagaaagaagagactgaacaataacttgatgatgttctttaccggattcactcgtttctcttctgatgttcagaaagcaaacaatgtatctgctaaagagaaagaagcacagttaaaagagatgttggctcttgttgatgaggcagaagaagtccttaccaacaagaaaagagatttagatgactttggccgacttcttgaccacacatggaaactcaaaaaacagacaggcggatctatttcaacaaacagtattgatgagttctatcagaaagggattgaagctggtgcactcggtggaaagcttcttggtgctggtggcggtggattccttgtgttttatgttcagccagaataccaagagaaagtgatggcagcagtgcacaatctactctacattccgtttaaatttgaagatggtggaacaagagtgatccactacagtccggaagagtggattcagagagactgatcagaggggaagaaatgagcatgaaagttgtgattatggccggaggaaaaggaaccagaatttcctctgtggcaagtgatataccaaaaccgatgattgagattgatgggattcctgtactggaaagagaaatccaatgcttgaaggagcagggcttcaaagatcttattatcaccgttagtcatcttggccacatcatcatgaactactttggtgatggattagactttggagtacatattgaatattttgtagaggagcagcccttgggtaatgccggggctctctttgagttaaagaataaattaactgaagatttccttttgctgaatgctgattcgatttttgatatagacttcaatcgaattgtgaagttccacaaagaaaaagggggactggttacgttatttactcatccgaatagtcatccgtatgatagtggtttgattatcgcggataagactggcgctgtagaacagtggcttacaaaagaagatgcaagacctaagtattaccagaacagggtgaatgctggtcttcacgtagtgtcaccagaaatattagaagttagaccagaaggtgcaaaggttgacttggatcgtcagcttttgaagcctcttgctggaactggaaagatgttctgttatgacagtccagagtatgtaaaggatatgggaacgcctgaccgttatgaggctgtttgtaaggactttgctgatggagtagtagcaggaaaaaatttaaagagaaaacaaaaagctattttcttagatcgtgacggaaccatcaataaatatgttggatttctgagagatattgacgaatttgaacttctaccaggtgtggcagaggcgattggtaaaatcaatagaagtggataccttgctattgtagttaccaatcagcctgtgatagccagaggggaagttggctgggaagaactacaggaaattcacaataagatggagactcttcttggcttagagggtgtttatcttgacgggatttacttctgtccacatcacccacataaaggctatgaaggagaaattccagaactgaagtttgattgcgattgcaggaagccaaagccaggaatgcttcttaaggcagcagaagactttaatattgatctctcacagtcttggatgatcggtgacggagaaaatgatattaaggcaggagaagttgctggatgcaaaacagcgcttattggtgagggaaattttaatcaaagtataacaggaaatagcctgttggaaattgtggagcatattttgtaatggggtactggggattctatagaaaatcagcataattttacctggggggatacacctcagattagcaaaaatattttaaagaattagctttatattgggaacaaatgaaatatctgcaaaagcaacaatagctaatagtgctttttttcttcatagaggtcttgggtgtgttgtacatgataatgcagttatcggggaacactgtacgataagtcaaaatgtaacaattggatctaaatggtctaatggtatttgtgatggaagttgtccaattattgaatgtggtgtttttattggtgctggtgcagttatattgggaaatattaaaataggggattactcggttataggcgctaatgcggttgtaactaaagatgtcccaccatatgcgatatgtgtagctgtaccaggcagaatagtaggttataaaaatggaaaaaatgaatataagattacagagacaagtgaatcttctgattaagagatatccaatacttgaaagtgtagaacagaacattattgatgcatatttagttatgcaggagtcatatgaaaatgggggaaaactccttattgccggaaatggtggttcggcggcagattcggagcatattgtgggtgagttaatgaagggattcaaattacctcgtaaaacaaatgataaatatgcaaataaactgatagagacagagcccgaacttggaaaggttcttgctgagaatcttcaaatggcgttgccagcaatagctttggatggacacatggcactttctacagcttatatgaatgattgtgagccgcttctatgttttgcacagcaagtgaatggatttggaaaagaaggagatgtattccttggaatatcaacttctggtaatagtaagaatatactttatgcggcaactgttgcaaaagcaaagggaatgaaaatagttggtcttactggtcagaatgatagtaagttatctgcaatagcagatgtaactgttaaggctccaaatatggagacatatatgattcaagaattgcacctaccaatttatcattgttggtgtttgatgcttgaggattatttttttggagaataaaaaggaaaacgaagagtaatgaaaagtttaaagaaaaaacaggcgatattatttgtaatgccaaggcttccatttccagcatcgtctggaagaaaaacttctttatatcattactgtcgcattttatcagaagaattggggtatcggttagtagttgcagcattcttggaaggtggagatgatcccaatttgaagcctgattttattgaacgtcttgaaatactgccaaaagcgactagtaaagagaagctaaagaatattacaatgaattctttaatcggaaagaaaaagccaatgcaggtttctctattttggagtaaatctgctaaagatgctgttgataaattagtgcaagaagaaaaaccagatattgtcattggcgatatggtacgaagtacagactatattaaagacattgatgcgtttagaattgctgatcttgatgatcgtatttctcttagatatcaacggcaattagataatgacctgaatggaattaacccatatggtgcttttttaaatacagttccatctattctacaaaggataatgctatttcaccctataaaaaaatatgttgtaaaaacagaaatagaacttttgaaaaaatatgaattggagatgggacgagaatgtgaaaagacggtatttgttgcatcacaagaagcaaaagatttcaatatagaactaggagaagaaaaagcatttgctatccctataggagtagatacggatacttttgcatatagaaaaacgggaaatgatggacaagtcataggctttttaggagccatgagtgttgcacataatgaaaatgcggttcgtcattttattagcgatatatttccagatattctaaagagtgaacctacagtaaaattcttggtaattggaggtggagtttcagaaaatctacaaaatctggcatctgaaaatataatatttacgggtcaagtaccagacgttaaagagtatcttgaaaaatgtaaagcttttgtgtgtcctatgacatttggtagtggtatcaaaacaaaaaacctagaagcgatgtctttagggttgcctgttgttacaacatctattggagctgaaaatattgatgctgtagatggtagagattggcttatatgtaatgaggataataagtttgcgaaagctgttgttgaactactgacaaatgaagaggaacgggttcgaatcggtatcaatgctagccggtttatagaaaagaattttacctggaatgttgcaaagaatgcatttgcagaggtattggagtgtgaatagatgcgtattttatggatgactttagaatgtatattaccagctaatacaggtggcagaataggtgtgtttaagcggttagagcaaatgactaatcgtggccatgaagtttatctttttttcccatatgattcagatatcgatgagcaaggaattcagttgttaaaaaaatactgcaaacaagttcgtccgtatagaagaaaaaaaactataccagtattatttaattctttgaggtatccttacacagttgcatccagaaatattccaaacatgaaaagggatattcaaaagtgtctggatgaagaaaaaatagatattatcaatgtcgattttccgcatatgttaatagatctggtaggattagacttgaaaggaactccagtaatacttaatgaacataatgttgaatggaaattttatcgtcagatttcggaaagtgctacaaataaaataaagaagttcgcttatcgttttgatgcaggtcgattaaagaagtacgaagaacatattgtaaaatgtattaatccttcatttgtcacatttgtgtctacagatgacaaggaatactattcaaagtggatgggatttaaggacaaactagagcttattccggttggagcagatagtagaaaaaaagatgatggaattaataagaatcaagatggaaaaatcatcttgtttgtaggaaaaatgtctgcagaacctaatattgatgcagtgacatggttctcaaaagaggtatttcctaacattaaaaaggaaatgcttgatgtaaaattttacattgtaggaagagatcctagtgatgctataaaaaaacttgcttctgatagcattacagttatcggtggcgtagagagtgtagaagagtattatacacatgctgatcttgttgttcttccgcttcgatatggtggaggtgtaaagattaagcttttggaagcgattagctacaagaaaccaattgtttcgacatcaataggtgttgaaggaactttatataaagacggaaaaacaattcctgtagcagatgatgaaataaaatttagcaatctatgtgtagaaatgttaaatagtggtaggggaatagatgatgcttactgtatttttgagcgtaattatacatggagttcagtgggggataaatatgaaaacttatttaaaaaggtaggtactaatgggtaatcagggaaatggcattatgaaaatatggatattatccatattttttgatgcatatgcgctagcttatgtgggaacgtatccaataacattatttacgttagtaacaatactagcagtgttgagcaaagccaaaaatgaaatgagatgttttaagattgaaaacaatgcatcagtgaaagctgcattgttaatggtggtgtatcttatcataaattattgtgttacaggatttaaaaattctaattcactaatgttgtccattatgtattttatggtatttattgtcacaacaagacgtgagaaggaacaaacatttgaatcacatatggaatttttttctaaaataatgaatgttattgctgtatatggaatttatcagtttgctgctagaatttataatttaccattttcagatatagttatagatggacacatggtgacagggtacaattggacaaaccgtgtaagatttcttggtcagtatttttacagatctaatgcaatttttagagagccatctttttttagtcagtttttggctataaatttattattacttatattgaagtttctagatacttcatataaaaaaaagaccaaagccagttggatcttaattaatgcgatcgcaatgattttgactttctcaggaaccggattcattatattgattgtgggattcttgttctacgctattaggaaattagacaacaaagtattacgaggcagaattttattaattctgcttgcaggaatagctgtactaattgcattattgcaaacacctgttggagcctattttactcaaagactgcaagaaattttcgtttataatactgataatttttctggttatgtacgttttagaggtggacgagatgtattagcttatgcgtgggccaagaagccgttctttggaacaggaataggaactgcatccgaatttattaaatcaatgcagaattattatgatggattgacagtaaatggcctctacagaccagctgttgagttgggggtagcaggtgaattcttttggattgtattcttaggctcaatagttcttcgcaaagaatttaatgaaaaaattaaaatgttacaatgcattataattccgtttttgatatgtcatgaaacttttcagtctaattattattggattctgttgtacatgctaaatgtaacattaatataccagactgatgatcgcatatacaataaatagagggaagtgtaaagcatgagacataatcataatgacaaaatagcggttgtgttagttaattataacggtctgaatgatacgcttgattgtattaaatccatacatggagcggatattatagtggttgataatgcatcgcattctaatgaattatctttgattttagaaaaatacccatatgtaataggaattcaaagcaaggaaaacagtggtttttctggtggaaataattttggaattcactatgccttgaagcatggatatacgcatatcatgcttctaaataatgacacggaaattgataaggatatgattcgtcatttagttgaaaactgttcttcggattcaatttctgtaccgaaaatgctatattactcaaatccggatgttatttggtatggtgggggtgatattaacaaaagtacaggaaatgcaaaacactggcaaaaaggggaaaaagacacaaagaattctaaaattcaaaaatgtacttttgctacaggctgttgtatgatgattccaagagaagtatttgaaaaagttggaattttagaagaaaaatattttatgtactgtgaggacacagagttttgtgtgagattagctttggctggtatcaatgtaaattatgtgccaaacgctaagctttggcataaaattggggcatcttctagcggagaagattcgccatttgctacgtactatatgacacgcaatcgattttggctagttagagattataagaattattttcattggacagcatttccttttgttttacttacaaggatactttgggtttttagaagcaaaggtgaagtaagaaaggcgtttatccgtggaataaaagacggattggctggggcatagattcgccaaatgaatgttaatggataaatgtcggcttctggactagtgatcagaacacaaaacagtataataagtcaggtggtattaaatggataacagagttctcttggttggctggggaagatccgtaaattatggaacaaatctacagacaattgctttatatgaaattataaaccaaaaatataaatgtgattttctatactctagaaaatattgcagttcaaaactatttgtgaaaaaagcaataaaaaagcttagatcgaagataaaaaaagagggtggtgtgacaccggaaaagaatagaaatatagacaaatgttatgaaaatataagaaaaattaacttgaattcaccttctgacaaaaaaataattttatcaaaatataatacttttgtggttggaagtgatcaggtatggaatcctggctatttggagtcgacgtatttgctagactttgtaccgaagggatacagaaaaatatcatatgcgtcaagtataggcgtgaatactatacctaagaagtgccataagatttactgcaaatacttaagtgattttagttatatttccatgagagagcagcaaggagcgaaatgcatcagtaaaatgattagacgttccgtggatactgttttagatccgacgcttcttctttcatctttagagtggaaggagatttgttctaaagaagtgaataatatttcttcaagcttgccagataaatatttactttgttattttgtgggaaatatggctcaacatatgaaggaaatccaagatatttctaaagaaatgaatcttaaaatagtagtgttaccaattacagaacaagaaacaagattatcagaaggtgttgtgattaataatgctggtccaaaggaatttgtagcagctgtgaatggtgcaaccatggtttgtacggattcttttcatatgtgtgcattttccttaaactttcagaaagagttttgggtatttaaacgttttaatgacaatagttcctcgagtcaaaattcaagaattgataatttgttttctgagtttggaataaatagatattttaatgatggcgatagacagtcattggattataacagaatatcaatttctttaaaaaataagagaattgagtgtaagaagcttttattctctgcaattgatggaaaggtagcggcaatacactccagttgagtagtcaagctacagggaaaaatcaaaagtccatagtatctgaattgtattgaaccacgatattaaaagaaaggaaacgtgtgataattaacttcctaattatcatacaagaataaataaatgtatacgattttggaaaatgctagaatagttgtagatttgttaaaaaaacataaaattagatatattgttataagtccaggaggatcaaatattccagttattcaagcagtacaacaagatgatttttttaaatgttattcggttgtggatgagcgaagtgctatgtattttgctattggactatatttaaaaacaggggaaattattgcaacttcatgtacaacagcaaatgctacaagaaattatgtacctggattaacagaagcattttataagagagttcctattttagcattaactatgtcaaagcatccaatgtatttatcacaggaatatatgcaatgtccaatacagacatcattaccgattgattgtgtaaagaaaagtttctcagttcctaggattaaagatgaatatgatagggcaatgtgtgtgagaattacaaatgaagcaattttggagttaacacatcatggaaatggaccagttcaattgaatatagaggaacttgacagtgaaacatgggtgtttgacaatagcgctgtattgccagatgttagaatgataaaacgatatgaaaaggttataaatgattttgatttttccaaaaagaaaataatgattcttattggagaaaatgtgcctttatctatggatgagtataattctattgaaaaattctgtgagtcgcataatgcttttgtttatacaaatcacctatcaaattatcatggaaaatattcaataaatgccaatttgttagttggaagtacttctgatgaaattttcacaaaggatttgagaccagatgttttaattacatttgggggaattacaggtgattataatatctataggaaattattttctttaagtaaatatattgaagagcattggagaatttcaaaagatggtgatgtcattgatacatacaaccaattaactcgtgtttatcagatggggttaaatgatttttttgatgcttgggatgataatttaagtatacatgattattttgaaaaatggcaagactatgataatagattggatagaaatattttattaccattttcgaatacatttgcagctcaacaattgtgcaataaaattcctaagaacagttatatgaattatgctatattaaatagtttgagatcttggttggtgttcaatattgataaatcaataaagtgtttttcaaatgttgcatcatttggaatagatggttgtttatcaacttttttgggagagagtgttgtaactgatgaattgtgttttctaattattggtgatttgtcattttattatgatatgaatgcaataggaataagacatataaaagataatgtaagaatattattggtgaacaataatggtggtgtggagtttaaacttggtgatttgcagtataaaacagatgttagttcttacatagcagcagataatcattttaaaaatgcagaaggatgggctggaacacaaggatttaaatatatttctgcaagaaataaggaagaattctcagctaatgttgacagttttatttcagatagcgatagacctattatttttgaaatattcacaaatccagaagatgaaaaaaaagcaggatttatgcttgttgacaaaaatagaaatgctacaacttctgaacaaatgaagcaaggaataaaaaatacaataaaaaatgttattggaaatgaaaattctgcaaaattaaagaatatgttgagaaagtgattctataaggagaatagctataaaaagtcaaccataaattagcaaaaagtttctttttatattggtggtaaaaaggtgactttaatagaactcccttagtgtgtttttcataatctatcgatattggtatacaaatctcttaatagaggctaaattctacttcgtcagtcagcatcttccagatgactctgacaagcttgccagctcaatgcccaagttattgtagtgagactggcatttagtcattttggcattgtaataagcctcaaaggtagcgttgtttctaataacgttacaagctgcattaacaagagcgtagcgtaatacgcgagagtcacgtttggacatatgagttgtcttagcctgaaagttaccagactgataaacagacgaatccagatcggcgcaagtagattattaggattgaagaaacggtgaatatcacctatttcatcaagaatcattccattatttatatatcatataccaggaatttgaattgaattgaattgaatcactatactaaaagaaaggaaacgtgtgataagtaacttcctaattatcatacaggggataaatgttaaaaaaaatcaaaattaaatatataaatttgcctattcaagttagggcatcattttggtttttaatttgtacatttacgcaaaaagcggttaatgttattacaacgccaatatttacaagacttctaagtacgtctgagtatggagaatataatgtatatacatcttggttaggtatctttactgtttttatcagtttaaatttatcacaaggcgttttcatgagaggcttattaaagtacaaaaatcataaagatgaatttgcatcttccatgcaatttcttacattgatacttgtattaagttcaattttaatttatcttccactgtctcatgttattaataatatgacaaacttgaatactacgagaacaatattaatggtcttaacaatttggcttacatcaatttttggattttgggccgcagagcaaagagttgactatcagtataagaaattagtacctgtaacattaattgttacaattacaggacagttgtttggaattattctgataaaaaattttgaagataaagtaacaggacgtattcttggaacattaattattgatgcgttgttttatatgtggttgtttgttattgacataaaaaaaggaaagacctttattaatattgagtattggagatatgcactttcatttaatattccattgattccacattacctttctcaagtgattttaaatagttcagatagaatcatgatagaaagaatggtaggaactagcgcagcaggaatatatggattagcatattcaatttcacaggtaatgacaatgtttaatactgctttggcacaaacagaagagccatggttataccgtaaaattcaagataataatatagaagcaataaaaccagtagcttacatatcgtttatttttattgcaatagtaaatctattgctgatattattagcacctgagattataagtgtttttgcacctaaagcctattatgatgcagtttggattattccaccgattgcaatgagcgtttttttctcattttcatattatttttttgctgtatttgaatattattatgagagaacgaaaccgattgctatagcttcttgtataggtgcaggggttaatattattttaaattttgtactaatacctatgtttgggtattacgcagcaggatatacaacactattatgttttataatatatgctacatttcattattattttatgcgtaaaatatgttttagtgaattgaatggaaaagaaccattttccttaaaagtttatttaagtatagctttcatatttattgtattgggctttttaattcaatttacatataatctgaggtggataagatatttatttttagtagtattttttgcagtttcatttttaaaacgaaaaacgattttattgattataaataaattgaaaaatataaaaaaaggggaatgatagcatatgaaaagaatactgttgttaggaggtacaggaactataggaaaatctcttttaaaatatttgcaagatgaaaatcattttatagtatatgttacttctcgaaaaaagatagataatagtggtaatatagtatatattcaaggcgatgcacataaagagaattttttaaaaagtatttttgataatgtaaaatcaatagatgttattgttgatttcatggtatggtctacagatgaatttttaaagatttatgatttgattttgagaaattgtcatagatatgtttatcttagttcttctcgagtttatgcagattgtgatggttatattaccgaaaactctcctaaactaattgataccgaggcaaataaatttttttataagcatgattcttatgcagttcctaagatgcaacaagagagaatattgaatgaatcaaattatgcaaattacacaataattcgtccatatataacatatggagaaagtcgaattcctttcttggattgtgaaaaggaaatatggttatatcgaatattacataataggacattaattatttcagaagatataatagaaaaatatacatcaatgactattggaaatgattgtgcaaaagcaattattagcatcattagttcacaaaaaggagaaggcgaatctattactatttctactagtcagaacatgaaatggaaagaagtattaaatatatttcaggatgtatttgaggaaagacatataatagtaaagagcaagttgatacctaaaagtgttaaagctaagaattgcgattttcagacactttatgatagatgttataatagacgttttaatataggtaaattggaagattatataaattctacagaatttgttagaatggaggatggaataaggcaagcattaacaagttttttagaaaaccctgtatttaatgatgctttacaagattggtgtatacaagcgaaaatggacaagtactcaggtgaatttgctaaatataaagagtttaataataataaacaatatttcacctatatgatatatagaataactcctatagctagtattaaatcattcataaagaggatagtttattggtttggaaaaaggagtatatttcgatagtttatattaataccatgtgaatattagagaacaagtttgtagtgagctatagtgtaatttctcatagaaaatgtatagactagcatggaatttaacagtctttacttattctggattataaatgataacattgatcttattttaagaagattagaatcaatctttctataatgaagtggtaatctaaaagtagacaccaacccaattattgtagacatttgcctggttcttgttttattttagacacgaattaatgcatgaatttttaatttaatatatgtgaagttgacctccgttggtgaagcatttgttttgctggcggaggttttttgatattctgaaatgcggtctgtgattgggacagaggattcgggtagagaattgtaatattgattgataaatagattataatatgctattatttagacaagtcggattgtgaaaataattgtttggattaattcaaggatacatatggtaaggagtaaggtactatgggtaaggttgggttaattcaagttgtaaaacgaagtcccattggggactgggatatttgatgggagagaggttgatgaggcctctcttaaagtgatgggtgaaaaaatataaatatttttgatggagacataacttatgcaattatattcattatgtatagaaggttttagaaaacattataaaacagagattaagttttcagattcaacatttttgattggagaaaataatgttggaaaaagtagtgttttatacgcattagattatttgttgggagcaaattcgagtattcctatagatgaattctatgcattggaagaagaaggaaaaagaaaaatagcagttgaaaatatagtttttactgcggagtttcgtagaattcctagagaagcaaattcctggagaggatttaaaggtcgtttattgaattatgaaccagatataaatgatccgtttgatactggattgaaatttatatataggaaaacatatcctaaaggtgggaaggtaaagatagagacttttgaaaatcttaaagttttgaaaagtaaatttagggattgtatatgtattcaagattatttggacgcaggactttcagaagatgaacttacagatgaaataaaaaaaataaaatatgataaaaaattgtctgcaaaggaaagagcgttattcgatgttatagaagatatatttgatattgattatagtaaagaaggttgggtagaaaacccgggcggtattccacaaaatgtactaagtaaattgcctaaatatttattgattccagcccaagatagtgagggagaaatctctggaacatctggaacattacaaagaactttaaatgagttgtttaatgaggtacgagagaaatctgaaaattataggctggcacaagaatatttaaacaaactggcacaagaattagatccatctgatgatagtacagaaatatcaaagatgataggagaaatcaacagtattatttctgatgtttttcctcatacgggtataagtgctctggcaaatttaagtgatgcggataaagtgataagaccagtatttgatattcaaatgaatagtaatgtttcaacatcatctaagttgcaaggaacaggcttgattcgttcaactgtatttgcattacttagatataaggcattgcgcgataataaaaaagatattacgcaagaaagacagctcattataggttttgaagagccagaaatatatttacatccaaatgcaataagcaaaatgagagatacaatttatagtttggctgaatcaggaaataatcagattgtttgtacaacacattctccatatatgattgatttgagtaaaaaaccaaagcaaacattgaatagattatctcttattaaattagaagaaagtacagcgttaacggttaaaagtgatgcatttaatatcacaaaagagtttttgaaattgcaggaagatgataaaaattatattaagatgcttttgcgagtggaagattcaattgcaaaatgtttttttgtaaaaaaagtgttaattatagaaggagatactgaacaagtagtattatcagagactattagtaaattaccaataaatttaagaaatgagattttgtcagattggtatatactaagggcaagaggtaaagctgcaattattccattgataaaatatttgagagcaatgcatattgatatttatgtaatgcacgataaggatgctgatactcagggagcggtaatattcaatgaacctattagacaggctttggattatgatgatcatttgtttgtattggaaaattgtgttgaagatgtattgggatatacagcaccaacatcagataaaccgtacaaagcatattgctatattaatgacaattggaaagagtggagagatattagtgagcaatggaaaataattatacaaaacatttttaatgagggaaaaagtatagaataggaacaataaaataacaatcttattttaaatttgaaaagggtaatcattgattaacaaggaagatgccattggtgataagattttcattgatggtattttttcttgttaaatgaatttaggaaagtatagcattagataatatttaatatataggttgtcattgtttcagagtatgaaatttaatataaaaatttttgattgtattgttgcatgtcatttgatgaatgagaacaattaagaaataaactattgcttaaaggggaacagcatatatgagcttattatggttaaatagcggatttatttgcaaagatttgtattcaccgtttgttttggaaaaagattttgattaccttaatgatttgaaagaaaaatataagattgtgctacagcaggcagaaattgcaaaagctgatgatgaaagtattaaaataattaagaagtttaaaaataagatactggaagcattaaagtgctattataaagcagacattgaaaaatgcaacataataataagaaattttattaaagatataggggaagattcatttgctgtgagcttattgaacaatagttatgcttttactggtgcttccaaaacagaaatacagttttttagatgttgaataggaaatccttctaatgcttatgaggcaaaagatatgctacatttgccattaaaattgaggtcaaaatcaggaaactatcgttttagtattccaggaaatccaagtttatatttggcaaattcttcatatggttgctggattgaaactggtttcccttctgaaaatgattttaatgtatcgcctgttcttttagatggaacacaaaaggtttttaatatggcagtttctataagagattttcatgctttgaataattttgaagagaatagagttcactgttggctgaaattatatatgcttacgattgcaacttcgtacagaataaaagaaggaggaagaacatttaaatctgagtatataatttctcagtcgattatgatggcatgtaaaagacttggatatgatggagtagcatattattccaaaagagtttatgatgaaatatttgcacgatgtgcgattaatctcgcactttttattgactataatggggattattcagaacttataaagcacatgaaaatggatgatgcatttaattatggtttgtacaagcaattgcgtccatcacttacatggagagagcatgaattacgttctacacatactggttttatcactaacatagggagttatgacatacaatacccatattcagaaacaaaatattttgattttgataaatttttgtttacatcatgggaaaacaaacctaatggaaaagggaaaaatcaaatttcatggggagtatcggttgattgatgactaataagaataattgtttataattattgattaaaatgatacataataacgaatagataatttccatgcataaataagtttcatgagaagttcaccaatgaccagatattggaagattgcacttggtcgaatgattcagaactttgttgatctgtctacattcactgatccgcttcgtacatcgaatttcccacagaactggacgatttattattgggcatattggatggtctggtgcgtggctgctccgttctttattggcagcatttctcgtggcagaacagtacgtcagacaattcttggtggctatatatttggtgttggttccacattgaggagctttattgtactgggtaactactctatgggaatgcaggtgaccgaaaaagcagactttattgcacagtatctggagagcggtgacctgtacgggatgatcgtatctatcattaagacgatgccgggtgcgcctgttattatggtagttgttttgttgacaatgattgctttttatgcgacgtcttttgactcaattgcattgacagcatcctgctacagctatcacacattgagagatggtgagcaaccgaataagggcattcagttgatgtggtgtattttgctgattttgcttccgattgcattgttgtttgcagaaagttctatgaacaatcttcagtcggtgagtattgtggcggcattcccgattggagcggtaattgtgatgattgcggttagctttatgaaggatgccaaaaaatatatggaaaatgtggaagaaaaaggtcagcaagaggttgacaatgttgacaacgaaaaataaatttgacaggagagcatgttgaattttaaaagtacaatataaaaatgtgttgatagtaatcagaatctttgcagttggatataaaagggtcaggtcttataataatttttctcccgctaatttcagaaaatggttattcaggtttatgtttttagaaaataaaatgccgttacaagatatacttgtaaccatgaatattcctatatgtaatattgtaaattatatttcggatgatgagatgattgctgggtgtacggataggattgggaatgggtggattaatgataatgaatgggatggaatatataacataaatttttaataaggttgaagtcagcaaaggcgattgtgtcatggtaaaagccggtacgattcatgctatcggagctggaatcattatatgcgaaatccagcagaattcaaattgtacttacagaatgtatgattatgaccgcagggacaagttcggaaataagcgcgagctgcatgtagataaggctcttgatgttgtggatactaaaagatatgtgccatatgaaagcagcattaatgcatatgatgaagctacgaatgaagccgcagcaactattgaagaggactcatcagaaggtcagttattagtaagctgcaaatattttgaatgttataaatatgatatatccgattcagtatctattaatgttgatacagcttatttccgctctgtgatatttacggaaggatgtggaactatacgcgtaggagaagatgttaaggcatataaagtgggtgatagtttctatataacttcaggtaataaaactgtggaaatagagggaaactgtgttgctattgttacgaaggtctgattgagatgcaggtatgtatttgtctagttctagttttgttatggccacaaaataatgcataaatttttaatttaatatatgtgaaattgacctccgttggtgaagcatttgctttgctggcggagtttttttgttattctggaatgtggtttgtgattggagcagaaaattcaggtagagaattgcaatattgattgataaactgattataatatgttaatatttagacaagtcggattgtgaaaataattgtttggattaattcaaggatacatagggtaaggagtaaggtactatgggtaaggttgggttaattcaggttgtaaaacgaagtccccttggggactgggatatatgatggagagaggttgatgaggcctctcttgaagtgttacatgtaatttaattccatttttaaaaagaaggagaaattgatgtgcttattttttaactaaactgtttgtgaaagaattattaactgatcaaatttttattaataaagtgatatgcaatagttgaagagtcatattttgaacgcaataatgaaggcataagctaaattgtatggtcgtagataatgaaaattataatatgttgcaaaatatttgcgattaaaatgatactatatgataggttgataaataataatttttttaaaatggataccaaagaatggaggtataatacatggcaagaaaaataatgtatgcaatatcaaatgttgaaggagacagcaagaagaaaatatattgcgaaaatttagagaaaaacgaatacgaagcaaaatacaaagggtatttaacatgcatcaagggatgccaagctagaataaaatttacacaaagaaaaaatgatattaaattctttagtacatggaataaagagggaaatttacatgaaaaaagttgtccttatcatgttgattataagggtaaaatgggaagaaaaaagttaaatgcttattatcaaagtatagagctaagtgaagaaataatattacgacgattaaaaagaaaaatggagggattacttaaacaatattcggatgaagatataattgatcctcctaatggtagtatggaagttgatgtaattggcgaagatgaagttgcagtatttgaaggtgatgaaaatgggaaaaagagtgaatatttgccaagaatttattatgaagatgctgaatatataagtactgatgatattggatgtagaaaatcagtttacggatttataagtaatgttcagttagaagaggataagaaaaaaggaaaatatgcttactttaatttagcaacgaaacatagtactgttaatattgcttttccagaagcgttctactcaaatgaattatcgtctggagtgcaagaatttgaaatatatgtatccaaagtaaaagaattagtgcaaaaacatcccaataaaattatggttattgcgtatggagaaataacccgaaagaagaaagataaaaatggagtaaatgtttctgtaatttctccaaatagaattttggttgataataaaacatacaaacagcttgtgtatgggtaaatagtttctgcaaaaagaatttaaagataataaatgtaaaattctatgatttcatgaagaattacttcagtaccaaatggttattgcggttgctatgaggaagtataatgaagcgtcgagagtacataagagagagtatacattatcagatttttatgttatttaatggcaataattatattctttagaattggtgtactaaagcagaatttatgaaaaattaatgagattggaggggatagattgaataatattataaaaaagacatttgaagaaattaatttacaagatcctttttttcaatctttaagagcagattatcctggttttgatgattggtttaaaaggaaaagtaatcagaatgcatttgttcaatacattgatgaaaagttagtcggttttttgtatttgaaaattgaaaaaatgtatgttgaagatattgtgccacctatttatgctgacaaaatattaaaggttggaacttttaaaattgatgcacatggaactaaaatgggagaacaatttatcaaaataattatggattgtgctttgtgcgaaaaagtagatgtgtgttatgtaactatttatgaaaaacataaatcacttatcaatttggtgcaacagtttggttttgaattttatggaacaaaaggaaaaggtgaaaataaagaaaatgtttatttgaaaagaatgaatataataacaggagatattaaaaaagattttcctttagttgattacaaatcagtaaagaaatatttgttgggtatttatcctaaatatcattcaattatgtttccagattctattctaaccacagagaataaaaatattattacagatgtttcttatacaaattcaattcaaaaagtatatgtatgttcaatgaaacaagttgaaatgttgaaatatggagatatagttattatttatagaactgctgaaaatgggaaaagtgcggagtattctgcagtagcaacatctgtttgtgttatagaagaagtgaaaaatcagaatgaatttaattcgtttgaagaattttacagatatataagcaaatatagtgtgtttgataagaatgatttatatcactggtttcgtcaaggaggatgtaaagctataaaaatgacttacaatgcagctttaaaaaagaggattgtacgtcatgacttgattgaagaaattggcttagagagaaatcaatattggggtttttttgaaatgaccaatgaacagtttaaaaaaataattcatatgggagagaccaatgaaatttttatcgacaagaactaatgtttgggctgagttgcaatcataaattgattacagtataatatgttatataaaattttgaaatggagtgaaaataatgtgtgcaatattattatcaattaatcctaatcatgtagaaaatatattgaatggaagtaaaaaatatgaatttagaaaaaaggcatgtaaaagacatgtagataagatcctaatttattctacaactccaattatgaaaatagtaggagaagctgaagtcgaagatgttcttgttgatgaaccagagactatttggaaaaaaacaaaagcaaagtcaggaattgataaaaatttttttgataaatattatagagatagagatcaagcagttgcttataaattaaaaaacgttatcaaatatggcaagccaaaagaattaaaagatttcggagtaaatagtgcaccacagtcttttcagtatatagattaaatctaattattaattaagccgagaattttatgacataatttaataatcttctatattttatattaaaattttattgcatgctgtaacaacagccagttttgtactgcattcgttaattgaacgggggttagcgataaatctgcagaatagaatgttatataagtgcatatgtgaattgcttgatgaaaagaattgcaaattgagccttactccagaagaggaaagatgtgtacgagcttttcgtgaaaatactgataaaacatctgcttcaaaatatgggacattgtctcggacgtagttattattgtgttttatacatgaatctcctataataatcgtatgaaatcaaaaagtttgaaatctgaaatttaagccgcaaatacacgataaaaggagaacccatgaaggaatacgataaatatctaaagttattaaaggaaaaatatcccacaaaacagtcagtttaccgcgaacttattaacctgaatgcaattatgaatctgccaaaaggaacagagcattttatgagtgaccttcatggggaatatgatgcattttaccatataattaataattgttcgggagtaattagggagaaggtagcgatgctgtatggagatgaacttactgtatatgagcagcaggagctgtgcactctgatatattatccgagagagaagctttctatacttatggatgagaataaggtgaatgatgaatggtacagaaatgtacttaaccagctgattcagattgcaaagcttctgtcttctaagtacacaagatccaaggtgcgaaaagcaatgcctgtggattttgcatatatcattgatgaacttattcatgcgcagaaggatgaagatgacaacaggagtgtgtaccacagacagattatggaaacaattctgagccttcataatggcgatgaatttcttgttgctcttactgatctgattaaaagactggctgtggaccatcttcatatacttggggacatatatgacagaggagcacatgcagataagatattagatcttctgatggaacatcacagcgttgatatccagtggggaaatcatgacatattgtggatgggagttttttgcggcaatccggtgtgtatggcacttgtggtcaggaataatattaagtacaaaactatgtcaattcttgagaatggttatggaataagcctaaggtttcttctacagttcgcagttaatacatattcagataaaaatgttgatgatgcagtctataaagctatttctgtgattctattcaagcttgaagggcagcttattaagagacacccggaatacagaatggaaggaagacttctgctggataagatgaatctggataaaggaacagtaagaataggggataaggattattttcttaatactaatgaatttccaactgttgacatgaataatccatatgagcttactatggaagaaatgtttctgatggggagattcagggcagatttcattaacagtatggcacttgagaggcatatcaattttctatatgaaaaaggcagcatttataaggttcataatggaaatcttctgtttcacggatgtgtgccacttgatgaacaaggtgtatttgatggaattgttgtggattgcaagtcgtattcaggccgtgagtatcttgattattgcgagtcaatggtaaggcaggcaagaaccggcgattcagatgcagttgattttatgtggtttttgtggagtaatatattatcaccagtgactggaaggtgtatcaaaacatttgaaagaacttttctggacaaggatagaaatgctgactataagaaggcaattgaagaggataagaatccatattatgtccagtatgaaaatgaaagaatctgtaaaatgattttaagggagtttaatctttataatgagaatgcacacattattaatggacatactcctgtcaggacaaaagaggggcagcaccctgtaagggctggtggaaaactgattgttatagatggtggtttctgcgaaggatatcatgccgccacaggaatagccggttacacacttatttataattcgcatggaatgaagattaaagaacatcatccgtttatgagtattaatatggcaattaatagtaacagggatattgagtctgaatcacaggttgtttatgtggaaaaacagcgggtgtttgtaaaggatactgataacggaaagcagatagctgaggagattaatgatttaatgaatctgctgaaggtgtataattcataaaatatgtgtaaatatgtaagttatataattatttccacttgatttctatccccaatagaatgtagaattataagataaactagattattattacgaggagttgcagcatggaaatttatgaaatgattgatctgcaggattgtccaagatgttttggaccttctatattagaagaggaagatcactcttattatgtgatgtgtatggattgcggctgccagtcagcatcatttaggtttgaaaatgatgaagacaggcttgatgcagctaaaagaacagcagaattatggaatagcggtaaggtgatatttacaggccgttcggaatagatattggagggagattttaatttatgaagagcaaagaagaactttttaatatgccgatagttgaactgagggaatatatgaattctctttctaatccggaaatacaggaagttgcaaagatatttgaggaagatgatattgagagagacccacttgaacttcttacagcgtcgaagctttttgattatatgaaatatgcaaatggttcggtggacattgagttttaggtgtttaagattttgaaatgatttttcatacattgtgtgagaataaatattaatcaggaggattattaatgataatagcagtaacatacgagaatggtcagatttttcagcattttggacattctgagaattttaagatttatgagacagaagaaaataatattgtccgtgcagaggtaattggcactgatggagctggtcatagcgcattggcagctgttcttaaggataaaggtgtagatgttcttatatgtggcggaattggtaacggtgcagtcacagcactttcagaagctggaattgatgtatattcaggagcagatggagaagcagatgcagcagttgaggcatatcttaatggcgatttaacatcagcaggagttaattgcgaccatcatcatgatcatgaagatggtcatggctgtggacactgtggaagccatgaagatgaagagtcaggctgcggtagttgtggaagtgatgaaggcgaatcagactgtggaggcggttgtggcggctgcggcggtggttgtggtacatttacaccatcatttgaaggacctaatgtaggaaagaaggtaaaggttcattataaaggaacacttaatgatggaacacagtttgattcttcttacgacagaggtgaaccgctcgaatttacttgtggagcaggaatgatgattcagggctttgataaggctgttgcaacaatgaatgtcggagacgttattgatgttcatcttatgccagaggaggcgtatggtgaagctgatccaagagctttcataacactgcctataagtgagcttcctggtgcagaagaacttaaagttgatgataaagtatatcttcagaatatgtatggacagccattcccagctagggttgctgctttaactgatactgagattacatttgacgctaatcatgagatggcaggaaaagaactgaatttcaggattgagcttgtagaagtattataattgaataatattaagataccggctggtacagctaaatgcagtatcagccggttattttattgcctggaaacaagctctttagtcagccgtatccattctttcagttctttccggttttcatcttccttgcggaaggcggcggagaatggtatacgcatgtctgggtcgccaatctgtaatacgactgaatcaggtgaaagcttcattgaagtaagataactgtttagtgtaaatgcaattccatatccctgttcagcaagtcggattcctgcgtcaatactgcttatcttataggtaagctctggcaggacatcagcatagaaaagggcgtcttcttcaagctgtcttatactctggttgctgtgctgcaggatgaatctttcttttcttacatgcgcaagatcaagccatggatagacgcatgattctttagactctgcaaaagagacagcagggtggcttttgggaagaatggcaacaagacagtcttcatatatggtttcataggaaagtctggtgttgctcacgctgttatatccaaagaacatatcaaggtcaccggcaagaagctgctcttcatggtttgagagatgtccgtcaatggcatatacaactgactgtggatacagtctgttaaatgcagtcataacagatggaaagagagactcaacctgacgtaccatgtaaccaacgcggagtttaacagctacatttttgccaatatcaatcatgcggtcttcaagctcaaagcatttcatagtaatatctctggcagatttcacgaattcctcgcctgcatatgtaagaatcatgcggcggccttttctttcaaaaagctgtatgccaagtgaagtttcaagctgcttaagatgtatgctcaaagccggctgcgacaagaacagagcattggcggctttggtaagatttccgtaattagcaattgtaagaacatattgcatgtctttttcagtaatcatatgaattccctttctaaaatagtgcatgtttcaataataatgtaataattatacataattaaaatgtatcaatcaattgaaactataaattagatttatactttcgataaaaacatacaattttatttttagtatgattcatattaaaatgtataaaaatataaatctgttatgggagaaaaagttcatggaaacaaaagcaaagaaaaaatggaaaacgccacatacatttgtaatacttgtggcaattattcttattgctgcagcggcaacatatattgtgccggcaggtgaatttacaaggttcaaagatgcagcaacaggcaagactttagttgaagctggaagttatcacagaatagcatcaagtccgcttaatccgttaaagattccttcagcaatctataccggaattgttaaatcagcgtcaacaatcacatttatgctgataatcggcggagcttttcaggtaattacatcaacaggtgcacttacagcgttatgtaagaagttatctaagacattttctaagcacaaatatgttgtgattcctgtatttttgacattattttctatatttggattcacaatgggaatgtcatcagaggttatgatattcgttcctatcggaattacacttgcgttattcttagggcttgataaagttacaggaacagcaatgattgcactcggtgcagcggttggattcacagccggattacttaatccgttcaatgtcggagttgcgcaggatatagcagaattgcagttgttctcaggaatggcttacagagtatttattcttgttgtgcttcttgctgctacaagtgcatacataatctgctatgcaagaaaggttgcagcacatcctgaaaaaagcgtaatatatggaattcctgaagaccaggagtacacatttgacaatgcaacagacacaattacggtaagacagattgcagttcttgttgttatggcacttggctttggaatacttatatatggcctttcaaagaagggctggtactttgaagaaatgtcaggtctgttcatatttatgggtgtaatatgcggatttatcagcggttacggtcctagcagaattgcaagggaattcggagaaggcgcaaagggcatcatagttggatgtcttattatcggaattgcccgtacagttgaggtaatattaagtgatgccaatattcttgatactatcgtgtacggaattgttaatattgtaaatgttatgccagattcaattaaagcagtcggcatgttcttatgccagtcacttattaactgcgtaatcgtgtcaggaacaggtcaggcagcagttacaatgccacttatggtgccggtttcagaccttgtaggaatatcaagacagacatcagtacttgcgttccagttaggagacggattctctaactcagtacttccaatgtcatcatcacttatgggatatcttgctgtatcaaagattccttatagcaaatggcttaagttcatgatgccactgttccttatatggacagcacttggatgcctgtttatgctaggtgcattaatgattggatattagaattgattaggagcagatattatgtcagacgatattaagaagcagcttggagcggttatcgacagctataaagaagatttatgccagatggcagatgagatattcgaccttgcggagataagcggggaagagtacaagacatctgatatattgtgcagttatcttgaaaaagaaggatttgtggtagagcgtggaacaggacttgaaacagcattcagggcaacatgggataatggaagtgacggcccggtgattggaattcttgttgaatatgacgctcttgaaaaaatcggacatgcgtgtggacatcatcttcagggacctgccggaataggggcagcaatcgcagtaaagaactgccttcaggattatccatgcaggcttgttgtgtatggaactccggcagaggaaactcttggcggtaagataattatgctcgataaaggttatatgaaagagcttgaccttgcatttatgtcgcatggttcacctaatacatcagtagatgaaaaatgtatggcactcgagaatttcgtggtaacattccacggagtaaaaagccatgctgcaataagtccagaagaaggacgcagcgcacttgatgcagcattattatcattccatgcaattgagatgttaagagagcatgttaaagatgacacaagaatgcattacacaatccgtaatgcaggtggtcctccaaatgtagttccggaccttactgttgcagaatatacactccgttcatacagcacgaaataccttgatgaagttgtagagagattctacaacattttaaaaggtgctgcgcttatgactggaacaacatatgaggttcagagagaccttccatttaagagcaaggttgtgtgccataaggtcaatgacctgcttatggcaaatgcagtatatgagaatgccccatcgattgcaccaccacgcgaaaggactggttcaacagatttcggcaatgtgttatatgaagttccaggctcatgtataagaattgcattcacagacaaggatgcaaagccacattcagaagcttaccttaaagcaggaaagagtgatgcagcgcataatgctatagtatacgcagcgaagataatggctgattcaatatgtgatgttcttgttaatcctgagcttcttgcacagataaagcaggagtttgacgtggcaagagaaaaaggctgattagtgggtttagcgataaaattgaattgaattaatagagttgtaatcaggcggcggagaaatccaaagcctgattttttataatttgtaagcataaaaaattgtatagacacaatatgtctgacttgaatgctattcttaatatacaaacaacctgtatttacagtcgatttatgtacagatgaaaggagacatttattatgggatttttctgggctaatgtgaaagctaatattgaaggagcagttgcaaatgcaaaaatgcattactatgaggataagctgagaagcgacgactatgatgaagacgaagaagaagattataatgaggtgcaggaggaatataacgcggacagcatagaagatagtcccgttgctaatatccaaaataactggaaatcaatattattagttcttcagacagaatataatattcaggatatacagatgagtacatggattaagccactcagggtagaaaatgtggaagataatattttgaatttatcttttagaaatgctgatgataacgaacaagaacataatatgaatgtaaaatatgtacagaaaagatttgcagatttattatcagatgcaattgctgaatatatggatactcaatatgtagtgaagattaaataaatggatgatacttagttataattaaaaattgatcaaagactttatcgtctggcaaaaatataagtcatattattgaatgatatatcaggtggaggagaaatccaaagcctgattttttataaaataaaacaatatgacaataaatgtctgacctaactgatattattttagaagaaacaagccggagactattaagaaggtagccggtggacaatatcagaatacatatacaggatggaataattatgcagaacgaattagaaggattatataacatgcttgtaagtcagacagatataatgaaaaatgtggatgaattagtagaaaaacagattgaacatgagctgatgcagttcaaagaactggcaacatggagcgattatgaatgtgaacgtgataaatacatggcagttgccgaagttgcgaaaaaagaaagcttcatggcagggtttaactatgcagtgagattacttgagcgcacgcacaacccttaaaacacgttccttttctttatcagaaagagactgaatctctttcatgatttccctgtcgattgaagaataatctccagtatattcacctgataacacataatccacagttacacctagtgcattacatatatagataagtgtaggcagggaaactttcacacggttattttcaatattgcttatatgagaagtattgacctcagcggcactggcaacagcgtcctgtggtaacccttttgataagcgtatttcttttaacttctttccaatactttcaaaatcaatatccttcatgaaatcccccacaacaaagattataaacttaatacatataattgtaatattgaattgttaatgttataattatctacaactaaaacaagattagtcatgggcaatataaaacatttataaaataaaaagacaaaatatgacactaagacatataatgtccaacctgtctgatatcatttaaacataacaagaagtcaatgcctctgcgtttgagagcagctgcattttcttcgtaaaacaaggagacatgtgatgaataataatgttgaaaatgataatgatgattatgtatatctgaaaagaccatatttatttaatatcaggtacaattcaagacaggtgtggaacaagctgccagatgaggaaaaagctccgtatgttaattatgaagaatattatgaggaatgccggcttataaagttgagaagcataggatatccgatactggcaattgtttatctgtttttattcgtggttatgttgctgtatattatatatgtgtttacaggatttaatatattttcacttattgtatagcgaattaatattagaacttatatttgtgaaaatgttgcataaaaattcacaaaaactaattttatattagcattttctacaacaaagtgctaaaatattaacagtttaaatcgtgaaatattgcattgcattatcttactgaaatgaggagaatgactacaacgataaagtaagccgtgtactaagcttgtatcaacgttttatggaaggagaagtagttgacaaagaagttgaagctgccagatatggtgtatctgagcgatccattcagcgtgatataagtgcaattaataatttctttgaacaggaagctggaaagagcggagtaatcaacacaatcgaatatgacaagaagaaaggcggacattatctcaatcagatatacaaaacaaagttgacaaacagcgagatacttgcaatatgcaagatactgctggacagcagggcgtttatcaagaaagagatgacaagcatacttgaccggatgattgattgttgtgtaccaaaggatagtcagaaacttgtagaagacctgataagtaatgaagaattccattatgttgagcttacgcataagtcagaatttcttgataaaatgtgggatatcgggcaggcaatacatgagagccgttatcttgagatggattacaaacgtaccaaagacggtgagattgtaaaaagaaaagtaaaaccagtcgcaataatgttttcagagtattatttttacctgacggcattcattgatgatgaagaggttaaagctgattttgatgtgattaatgacgcatttccaacaatatacagaattgacaggattagcaattataaggtgcttgacgagcaattcaagattccttatggcaaccgttttaaagaaggtgagttcagaaagcgaatccagttcatgtatggaggcaaactccagaaggtcaggttcaagtataaagggacaagcgtggaagcagttcttgacaggctgccaaccgcaaagattctggaagaaaaagatggcatatacaccatatccgcagaggtgttcggcaagggcattgatatgtggctgaggagtcagggcgatatggtggaagtgatataaggctaaggaggagacaaaatgaaagtggttttaaaaattaacaaatttatacaagataatatattaaaatggtattattttatatctatttatcttgtaataagtttaatgaattttggatttataagtttaattattcctacatggggttgctatattatagaaatattattaacaggatttttatcatattatatagcagttgtatatagcttcattcgtgataagtataaaaaatatatgatttcgcgaatggatcatattgatgagcaaatgctgaaaatgcaccaatatataaatgagttggatgataacaatagaaatttattcaatgaaagaatagactctttgattgaaaatttatctgaaaattctaatcaattgacagaattaattaatgatgctcagaaaacagttgtaaatacagtagagtctaatacaagtaaattacaggatagtataattgatcaaattaatgaagaaacacagttaactataagtgtaatagagaagtgcaatcgcaaacaattagataagattgatgaagatatgaatttgaatatgaagcattatgaaaaggtggtttcagatatttcatgtttaaataagattttaaataatcaggcattggaaatcttagaaaaaataaagaaaaataaggagttatttgaagaaaagacacaattattagataataatcttacaagtatttataattccattgtagaaaatgttgaaaactcttctagtgaaattaagaatataatggttgataattcaaatattattaatgaaaaaatattagaacttaattcagatatgaatagaagcaacgaagagtttaaggctttatataaagaaaagacacagttattagatgataatgttacaaatgtttataattctattatagaaaatgttacaaattcgtctgaagaaattaagaatataatggctgatgacagaacaatgattattgataattcaaatattattaatgaaaaaatattagaacttaattcagatataaatagaaatgatgaagaatttaaagctttatataaagaaaagacacaattattagaggataatctgacaaatattcataattctattatagaaaatgttacaagttcatctgatgaaatcaaaaatacaatggctgatgatagaacaatgattattgatactctgaatcaagatgttgaaagagttgagaaggctgttgttaataattcagagactatcaataataatatatcagaagttaatgcgaatataagtaataacagttcagagataattgatagttattgtatacagtcaaagtcattagaggataacattaaagaattcagaacaatggtttctaacaatatgacagattcctttggtgaagtaaagaatataatggctaattataatgatggaataacagaaactttagaaaaagagtttaataaagtggaagattcttttgcggataaaacagataaaataaaaaataatatttcagatttgagtaatcagatgatagattcaaatattgaaattatggatatttataaagataattctacattattaaataataatatatcaaatactcaggctgctgttattgaaagtatagttaattcttcgaaagaaattgataatatattatttaattataagaatgaaacaatagaattagttgaggtattgaaaaaagctgtaaatgacaataatgaaataataaagaataattttgatgaatattcaacgaaagaagttacaaaatctgaacaattaaataaatatgttgataatattattggattaataaatcaaaataaacagattaatgataataaattcaataaaataataaatcagaatgaaaataataatacaagaacattgcagcaaattgatgatttaaaagaaaaagttcaaaatactcataatgatattattagtaagtcaggtgatttagaaaaggctataattgactacaataaatctgttgtagataataacttgaaattatcgactaaatttgataatgaatctaaaacaataactgaaaatataaaagctggcagtaaaacaattgatgataatctcattaatataaagaattacatacaaaaaaataataaagatattcttaataatatgtctgatattaagagtcagttgaatcagagtgagttaagaactgatgagaaaatacaaagtttatcttcaagtttatcagatatagaaaagagattactcaaaaagtttgtagaattgaatgattatcaatctgaaaaatttgatgataataaaaaactgtatgacagattatttaatcagataataaatttatcaagagaatcaaaacagcagataaagagtctttcaaatgaaatcatcaaacagaatgatgaagttataaagactaatgcagatttaaaacaattaaatacagattatttgaataattctcatgaaattactaagaagttagatgactatagtaaagatacagactattactttagaaattatcaatctgatattaatgctagattggaaaatataaagaatagtattagtggtattgattctttgatgatatttattaaaaaatatattgaaaagaatcagacagattcaaatattcaaacagaagaaaaaaagcctgacagaatagaaaaaattgaggataaagatacaaaatctgtattcgaaatgcactataaaaataacaaacttactaaaacagaacgttatgttgaagggaaaaaagtctttgatgtagagtattcaagcgatggaatggaagagagcagtagagattatgatactaaaggacagattataagagaaatctattatcatccaaatggacaggttaagaaaagaatagaaagatttaatcgcaatggctctataaaagaggagattaccaattatgataaaaaaggtaacaaaataaattaatggaggataaatatatgtttttaggaatgttaaatgaaaaagaaggaaaaaactttttggaacttgctaatattgcaatgatggctaatggcgatgaggtcaaagaagcggagaaagccgtgctacaagcctttaaattagaattggaaatgcaggattacgttattaagaataagaaacaagaagaattaataactgcttttcaggcaagtactaaaaaaataaaaaaggcagtaattatagaacttgcgggagttttagatgctgatgaagggattgatgatatagaagacagttggattagaaaattaggagaagatttgggattcagagattcagaaataaaaaaaatggttagatggacacaggatttcaatgatcttttagatgaagcatatgagtatattaataaacgataataggaggagtaatcatgggaatttttggaggatttattcgtaaaattggtagtgcagcaaagaaagtaggtactgcagtcgtaagcggagtgaagaaagtaggtactgcagtcacaaatggagtaaaaaatgttgccgcccgagtttcaggtaaagataagtatgaagaagctcaaagattatatgatgagatatccaagcggtacaatgaaaaacgggaacattttcaaaaagaaatagaaaggattactgcacttattgaagagcatgtaaaatcaataaatgacagtaaaagaatgattaaaatggaactacttcctgctatggttaataaaataagtaaaataaaggatatacggatttctgatgagtatagtgtagaagagtatattgaatcagtattaaatgtagattctattagaagtagagaacaactttttacaatagattttaatgctcataaagtaaaaactacatttcaggcaatatttacattaggattttatactaggaaaaaagctaaagaaacattatgtaatgtgaaagaagaagaaagcaaaattaattcagaaattagtagaatggatagcgaattaaataagataaacattatagaaaagtcaattaagcaggttgctgatatgtttacttcagttattgaaatgtataataacatgttaattaggttagatagttctattaattatttattagttagaagtttagcatttgcacatcagatagtcggaaagcagatgagtgtaaaagttttaccaatgatgcagcaaaaagaggttgaagctatatatactgcaagtaaaattctaaaggtaatggcagagactcagcttttgaatgttgaaaaacagaaagatgttcaggaatatgatagaaaaataagtgataataaaaaagaatttgaatcaaaatataaggctgcataggagtgttaagtatggatgaagagagaaaaaaagcaatagaagaattagaatatgcgtcaccattagaaattagcagattattacaggagatggaattatatgatgagaagacatctcaggaagtgttagatgaggttcatgaaaaatttgattcggcagaacacttggaggatgaagtgctgaaacctgtgtttatgtcagttatagatggacttcttgaagctacatctggtggaagagcagcgagaaaaaagggacttacagcatctagagttgttgaagaatgtactagtttttcatatgatgatttggaggataatcacaccaatgtaaatggatatacggaatataaaaacattaatcatgatgaaatcgagtatcaggttcaattagagaaatggaaaaaagatgggaaaaatggtgaccgaccacaatataatggttcagttaattcaaattcaacccaggaatatgtaaggtctaatttagaagattcatctgctatgaatgattacaaggaaaaacagcgtcatggtgagaaaaaaattaaagatgaatacacgggaaaagataatttatatgttagccagaataatatgcctgataattataatgatgagacacataggaaacaggctcaaccagatcatattgttccattaaaacaattacatgaacaatataaacataattatgctctggatgattcagatttaaagagaatagccaatagtgagtctaatcttgcaataacttctgctgaaataaatcaggtaaaaagagatatgaccaataagcagtatatagaatggatggacgagcatggaaagccattagatgaaaatactaaaaaaatcatgctgcaaaaacaaaaagaagctaccaaatctattgagtctgatgttaataaaacggttgctaaaaatcttgttggaaaaggtcaagtagatgaaaaggcaatgaaaaatgccgtaaatgaatttaaagaaaataatggacaggcaccaacagaagaacaaagaaatcaaatagaacagaatttaataaagaaaaagacaaatgaaataagaggaacagcggtaaaaaatgctgccggtcaggctaaagattacgctgtgggtaatcttatattgtttattgtaaaacctatttattatgaaatatctgacatatttaaaaatggtttaaaggaaggcgttggggcagattcaggaagtcaggcgctgggaattcgttttacaagagtaaaaaaatatgtaatgactcatgcaaaagcattttttggtgatagtatattggattttgttaaaggctttgtatcttcattaatagaaggaataattagtttatttgtgggaatgttgaagcaagttctgaagattctaaaagaaggagtaaagatactagttggttctgtgcaaattctatttggtaaaaatgcaaaagcaatgtcaccagcacagaaaggtgatgcaattattaagttaataggaggcagtgtaattgctatatcaggagttgcattagaatctttattaaacaaaatcggaataggtgatccttggtcagttgttttatcaacgatgttgtcaggaattgcatcagcattatttatgtacatattaaataaagcagatttatttagtacaaaagcagaaagaagatatgaaagagtaaaagagatattcgatgaacgaataaaagacgttcaagaagcaactgaattattcgacagagtcgcattagagacaatgaaagagcagaggttacaatttgaatctattcaggaagaaataaatacaggtttggaatcaaatgatatagattcaattaatacaggtttatataaacttgctgattttatgaaagttgatttaccatattctaatactaaggaattttgtgattatatggattcagaagaagtattagtattataaaatagttgatgtaaaaaagatttctttttgttttatattgttgaagcaaaaagaaatcttttttttcacatatttttactctgccacatcctgtcaccctccggcggtacactttagacatcaaataaagtgaacagccaaaggaggatatgactatgggatttatggacaaattaaaggaaacagcaggaaaggctgcagagaaagccagtgctatgaaggattcagcaatggattcttatggcaagatgaaagaagctaatgagcagaagaaagctgagaagcaggcttatacagcggctatggagcaggaagtgaatgaatattcagcgaagctgattgagagcattactgcagagtatgctgacggtggtgcaaagttctggggagaaggcgacagggctgcgattgacaagtttactaaggattattatgaaatgcttgtgcttcctggcagcagacctaacatttcatgccttacaatgtcaccatacattgatgaaaaagcgatgaagaagtttgctgataagggtggtgtcgatttgcagggcgcagttccacacatttttgttaaagatggcaatgatgccggtatagttatcaccgaggatttcattgcatttaagttcagatatgagaaggacagcagtttctgggttaagggcaagattccgacagccagtatcaatacatttgtaatggagattaatgattctgctgcaaatgtgatggttaacggagttaagctgactagaatcagcattaaaggctcttacagacaggattttatgtcacttaattattattttgagtgccttggaaagcaggatttcacgattgacaggcaggaggtcaatgaccagataagagccaagattggtgataagatatatgcgcaggttaagaagtactttattgacgatgatgagcagcttcttttctatgcaggaggcgtagactcgcttacagcggtggattatgttgcgtgtactgataatcagctgatatttgtgaacagggaaatgcttggagcaacggctaatgttaagcagttttattttgaagatgtgacaagcatgtcaacgattcagaattctacatcaagtgattttctgacggcagttattgatactgcacttacagctgcatttaagctatgcgatttggaggtttcagttgctggttctaaagaggttatcaataccctgtatcttgccgaggcaacacgaattattgcaatctatcatgagatgagaaaaaatgctaagaaagccgcagcacagcctattcaggttcagacagctccggcgcagcctgacgcattggagcagttgcagaagcttgcacagttaaaggatgcaggaattatttcggaagaggaattcgctgcgaagaaagcagatttgttaagtaaaatctgatgtggataataactgaatattaataataaactccccataagcgttgactgcttatggggagttgttatttaaatattttcttaataaagcaactgcattttttctatctcatatttcatttccttaacaaattcatcaggggcaattacttttacccatgagccctgacttaacaggaacattttgattccgttgccgtagacttccgcttcgatgagatatttgttatcatagcggtcaattactttggcggttggcagacggtcaagaatagcctggagtgatggtccagtgaattcaaatctgatttttctgagtggtcccggccacatgaactggcttcgtttgcggagcagtccttcatcaaattcaacatttttaggaagttcaagcttttccctgtgaacggtcatatcacagattctgtcaattctgaagtatgtaggtgtatcagataatgtatcttcacatttatatgcaatcagatagaagtagtattcactgaacattattgatactggtatgattctgtgcttgactctgtcacggttcattttgtaatagctgattgtgattgcccgctgttcctgaatgtagttggagagtttccacacattgtcaatcacgctgtcgcagtctgagccgacttcttcatagttaaacatttcttttgcaataagctgttcaaggcgttttttgtctgaatagcttgtgtgcgttttcagttttccgattattgtgagcagttcttcatggctgaacgccctgcttccgataagcactttagctatggcaaaaagctctttattagaaaacagattgtccatctctaatgtgtagcagtggtctgaagcagagtattttaactcggcattgccaaggatatcgcgatagtcggcaaggaatgctttcaaatcgttaatatctcttgttatgcttcttgttgacacattactttcgtcggcgagtgcggctaccgagagagactcaccctttaaagctcgaaacagcagtttaaggactctgtcagctttgtaattcttatattcattatccatatccgatgcctcctgatattgattatactatattttatagacaatatgttatatcagattagcgacaaagcctgtcacagtaaatttattcataaatattttgctgtgacacagcatgtcagtctggattaatacaatgattatataaaaattgaggaggaatgatggatacggagcgaaaaatgagttatatcaatgaacgtaaaaggcggcagcgcagggaacataagttaagaaaatttactaccttatttctcatatactgggttgggtttagcctgactattatgatcttttttaaatacaagattaatgaattgtacgagcttaacaggaagacacaattacagattgagctgcttaaagagcaacttaataattacaatgagaaggacatcaggaaaagcaacggtggaaagtataatacttggactgatgaggtgtgtgataataaatagaatatgcggatttattagatggcgtgggcaaaggtctgcgtcattttttattacaaaaatttagagactgacatatcgtgtccaacctaaatgttaccatatatgtgtaatcaaaagaacttaaacatatatgaaggaggacaaagctatgttttgtaaaaaatgtggaaaggaactggaagataatgtccgtttctgtaattattgcggggcggaagtagagagcaaggttgttgattttaatgaggcggttggcaataataaaccagataacagttatgccaatgcaggtggacagaaatataattatgaatacgttatgccacagcaaccggttcaggcatcagccggacagcctgtagaagaagatgtatcaattaatattgcaggacataagattaagggcagacttataatgaagattgctgcaatagtggctgcagcatgcttcttttttcctatgtttacagtgtcatgtgcaggggttaatgttggaagtgtaagtatggctgatttaacatttgaaacggaagatacaacccaggatagctattatgattattatgactcagatgaagaagaaaatggcactgtaggaatgattgtattcctgcttgcacctatttcagcattttgcatatgcatggtaaagaatgaaggaaaaggttggggaaaggaggcagttgctgcatttggctcatctgcacttgcgttgataagtctgtattttgttattactaatacaatgaatgacgaatatggtggctatgttcaggcaaaaccgatgttttcatattatttgtacataattgcttgcgttataggtgcggttgtgggaatcatgattattaaggaacatcagaaaaagattactgcaaatgttggaactgtacagcatgtggagaagcctaatgtatgggtaaagaccgcattatatacagttggagaaacatttgcaatatatgtattgttcttcctgcttagtgcgactttttaaaatgtgatattatccctatggaattttcaatcacatagtaatataatatgtaagccaccagtcctgggaggggtgctgcgaaagcggtactatcggagtctaggttcaatcactttatttttcccgtagaactcgcgatagctggtggcttttttattattatggagtacagatttaacatggaattacttgatatcgttgatgagaatggaaagccgacaggtgagactgttgagcgaaagactgcacatagtgagggaatcaggcatagaacggcgcatgtatggattgtaagaaagtctgatgagggagcagaggtactgttgcagaaaagggctatgaataaggattcgtttcctggaagatatgatacttcttcggcgggacatattcaggctggtgatgaaccggaagaatccgctataagagaattgcatgaagagcttggaattaaggcttctgttgatgatttacagtttgttgatacatttgtaatccaatatgaaaaagaattttatgacaagatgtttaaggacagtgagattgcatttgtttatgtatacacgaagccagtcaatatagatgaacttacattgcagaaggaagaattggacggcgttgagtggttcaaccttgaatatgtctatgaagagtgcagaaagcataatcagaaattctgtgcaccggttggcggcttggagattgtaagaagttttgtcagaggtaccgggttatgatttcaagaaatatgtacaagacaggtgttgtgttaatggcactggtaacagcatttacagtgacaggattgtcggggtgtaagagcagaaccgtatctggtgaagtggcagcagagtatgacacaccagatgattataatgatgaaagagcgggtgtaacatatggaaatgttgatgagataagctattattcacccacaaccggaagtgagcgcaaggcttgtgtatatcttccgagggattatgatgagtcacagcgttatccggtcgtgtatcttttgcatggaatgagcggaagatattctgaatatagcagaattggtgctttgtatgttgcacaaaatgcagttgatgattataacaggaatcctgtgattatggtgagctttactgtattcacagatgctgatggtggtcaggagtcagactatgatttctctgaacttacagcaaaatatgatgcgtgtgagtatgatgttattaatgcattgattccatatattaacgagcattattctaccagaacgggaagagagaatactgcaatagcaggatattcacttggcggaagagaatcgcttttcctgtgttttgcacatcctgatgtgtttggatatgtaggtgcatttgccccggtaggaggagtggttgatacaggaagtggagaaagagtttatggaaacagaggatttcttctgcctgaacttgttaaggatggaggtcagcagcctttggttactcttattgtaacgggcgacagtgatccttattgcaaggaatctgctattaactattcagattatatgtcaagtcatggaattaaccacattttctatataagaccgggagcgcatgaggtcagtgtatggaataatggattgtataattttatcagaagaatattctgatgcttgaagttatgattcatatgtgagataatgtcccgggttagtcgggttagacatgctggcttccacacataaagacagattatggaggattgttttatgtcagatatacatagcatagatgttgaagatgatcagtttgcatatcgttatgatacacagcttcttattgacagaagagatgaagatttagatgaggatgttattgctgattatattacagaacattttgaaggaaactgcctgattgcagcaggcgatgaggatcttatcaagattcatttccatactaatgagccatggaaggtacttgaatactgcagtactattggtgagatatacgatattgttgttgaggatatgattcgtcagtcagcagggcttcatggctgataagttaccggtctgagataaaacgtccgttagtgataagctgcctgactgagataaaccgctggtcatcgataagtagcttgtctgagataagccatccgtcatcgataaactgtttgtttgtataaagtaggatttgacgtgatacctataggtagtcgtattgatgatagatttataggttgaatttcagcgatttttgattttttaagaagattttattctgaaatacccataagatagcatgtaaatgttgttttatgggtatttttgagttgcttttattaatttagatgatttttttaagaaatgtgcctataagacaagcaaaaaaataaaatttataggaacgacaggtcgtcgaaccagatgacaggcggtcgagccagccgaacccggacattcaatacatttgtaaaaattctgttaaataattgacactgatatgtcgatgaattaaaatgtatacaagaagatttaatatactaatgatatgaataattttgaatacatttgaatgataatgattaaatagatgcggctatttattataattgctaaagacgggagggagttaccatgaaacacaattataagagaattactgcattagctggtatgacagcgttgcttgtttcaatgccggtatcagtatatgcaggacagataaggaacacatatactgctaatctatcaaatgttttggggagtgttgatgcatctgctttgaagggaaatccagttgttaagggaagtaatattgtggtcgattctgatacagatgactgggatgatattacctcaagaacagcagatgctgctggtgttaagctgtggaaagcagcggtttcatcagattattcaaagctttattttatgtatgaaggaactgttcagactgaatgggactacagctatatgggaagtaatcctgtgagtattacttatgctgacggaacaacgggaatatcagataagattcagtttactggatggaaagacagtgcacaggcaaagaattcatggtatggggatatagagaattcggagactgtaactgttaataatgcacatggtaatacagccggaccttatgtggttgagacagctattccttttgatttttttgctaattcggattttaagattacatttgcaggaacaactgtagatattaaggatattgaagtattagacggacagaaggttgaaaaagatgatacagaagctgtgtataacggaattgttatagatggtgagtttgctgactgggatgccgttaagaagtataatgcagtatgtcctaatgatgcacataatgaatgtatatctaagacagctatgatgtttgacggtgattatgtatatgtgtatgtgaaggatggaactggcggtgatgcttcaggagccggagctcatagtaatggcaggtattcgataactacagatctgggttacgaacttgtttttcagcttgacagcaaaggatatgttaatggtgtagacggtgttgactgcaggcatgttggtaatcagtgggagatagcagttcctaagagtgccctgccagcttataacaagacaatatcatttggattatacaggtcagagccttttatatcaggaactgccaatattaaagatgatgaatcttcggatgataagataatatacgatatcaggtatgacggattgtatggtgactgggaatattatccacacacaacgattcagtattctacaaccggaacacatcataatatggttgattctgcaggagcattattcagtaatggaagtactgttcttggacatgtgtatacaactatgccggagcatcttaatgaagctggaggagagtttacacaggcagtgacatttaagtttaatgacagctataatcaggtactatatccaagatttgtaacagttgacgaacagggaaatattaactggaaccctaaacgtgacggacttagtgatggtacatatgaattctatatgtttgacacaagtgcatggggaacatctaagaatattaatgaacttaatgatgcagatatatgttatggaaagatgatagttacagttggaagcaacagggatgaatgtgagttttattttgatcttgacaaggttgctcagaaacttggctgtgatgcaagtgatttcaagcagattagtgcacagtttggaagactgggacaggaatggattaatacagcaggagcttcatctggtgcatggcttggacttttcatatgtatagctggaacatgtggagtagttgtatataagaaaaagaaaggcagcatacaggtataagcggaatgaatcctattatagtaattgcaattataataatatggctgtatatactttctgtaacgaagagagcaaagcttcatgcatggagcttcatgtggggaagtctcggactgtttgtaattatgatgatgacggtacagccattgcttacaatgcctcttgcaagatgcgttgcagcaatggcaggtattgtgggagatataacaggtgcatttacagcatactttaaatacgggattatatttatacatacgggtgcatcgtcaatgacactgcttattgattttgagtgttcgggaatcattgaaatcatggcatttctgtcattactgatattctttaatgtgtataactggagtgagaagctgatgataggaattggaggcttctgttacattatgttatgcaatgttctaagaatagtaatgatatgtcttgcggtacattttttaggcatgaatgcatattatgtatttcatacatttataggaagaatattcttctatgtactcagtgtgtatctgtatttttatgtatttacgaaaccacagattgttaagatgaaagtaggaaacttctcatatggtaaaaataattcttaattcatttcttttctggggcggatggataattattcctttcattatggaaattgttcctgcgttaggaagtgtttttcttcttataagaaggaatctgagaaataaaatccataaaaaggaacttgaggtttatccagagattacgcttataataccagtatataattcggcagatacactatatggatgtatcagatcgattaatgacagtacttatccgaatgacaggataagaatttttctggttaataataaaggaaaagataacagtttcgatatatatgcacagtgtcagcaggaatttccagaacttctgatgcagtggatgaattctgaacagggaaagtcaagagcacttaatctggcactttataacagtgatggaaagtacattatcaatctggatagtgatggaatgcttgagaagaatgcacttgtaaatatgattacaagatttgagaatgatacggctattaactgtatgacaggctctattcttacggtgccagaacagattaagaagtataaggcaggtccatcgcggcttcttcgtgaactggaatttatggaatatgcgcaggctttcctggcaggaagaagttatgcatcagagcttaattcagtatatacattgtcaggtgcattttctgcatttagaaaatcagctgttttgaaatcatggatgtataacacagatactatctgtgaggatacacatattacattccagatgaggtatcttcagaaagaacgggttgaagtgtgtgaggatgcactgttttttgttgatccgattgaaaatgttaataaactatatacacagagacagagatggcagagaggaagccttgaagtatccaagatgtttatggacaagtctttcaaggtaaagaacctttttactaatataagtgtcaaaactcttttgtatgaccatacatttgcatttccaagacttatatggtatctggcacttatatgcctgattgttgtgggttattctgggaaaacggttattctatctacagcaataatatttggtttatatacgcttatcggatatctgtattttattgttgtagcatatttcctaagaattaataaggatataagaagatattacacgaggcactggtggtgcatactgtttctgccattttttaattttgctgtattctttataagacttgcaggaattattaacagtattgaaactgacagcacatggaaaacaatgaatctgtcagaggaatgcagggcatttgcagatgtggttaaaagtgatttcagtaagcctgttaatgcaataaagaaagtaagaaatgcacttaattatgatgttgtagaagataataataacaataatcagagggaagaacatggaaaagaagcttaataagaagcgtgttaagaagaataaaaagccaaaaaatgtgcttgttatcacaactatttatgtaatatgcttctcggttattgccggagtatttgcatatacaaggattaataagtacgaagaaggagtccttgaggtgtgtgcaacacagcaggacgcttatgtgcagcttgttttagaccagattaatcttaaaagcaatcgtgatgatgaacagattattaatgatattcttggtacgatgaattcatcttctaataaatactggacattttctaagaatcagtcaatcctttttgtaaaagatgttcttgaaactaacaggtataaaggtgttaccacagctacatattatgagtcagagagtgccacggaatttcttaataatcttcagaataacagagttactcatgatttcatagaaattgatggaaatagttatgtagcatcaggggttacatttgaatataagaaccagtcatataagttgtgcctgcttacaggcagaagtgcaattatggataataacagttatatgcagattaagatccagatggagacttatgtggtgattctgctttttgtgcttataataacagcgatgctgcttgcacataagctaagacggatgcagaagacgattattgaatctgacaagacgattgcagaacttaacagtatggtttctaagatgaataagaaacttttagagaaggatttgcatgatacgcgcaataatgtctgggataatacggcaatcatgccttttcttgataaattagtggcaagagatatttatcctgtaacatttatgcatattgcatgtgttgataataaggaacgaacaaagtttatagcaagagctaattatattcttgataaaaatgttttaagattcacatatgaagataatgatattgttcttatatttgttggaatgaacagaaagcattctaagcagagccttcagcttttaatggaaaattcaatgaagataatgtatgcaattactattaagagcaaagcggatgcagataagttaagagttaagtatgaaatcagatagaatgggcaggtaatataagggaggcggaattatggcagttaatatgtacagggaatacagactgaaattttaccttaatatgagacattatattatcattaatgaggtcaaaggtgaaactcacccacatacatgggagtttgcactggatattaagttttcaaggaatttatttgttgaatttaatatatttgaacagggaatttcgcagttccttgaaaagtaccagaataagattcttaatgaggcagagccgtttgatgcaatgatgccgacacttgagaatgttactgattattttgcggaagaattttttaagattatatataagacaggtggcatgctcacaagagttgaggctagtgaaactcctacaagaagctatattgtaaatatggcggagcaggaacgtaattcaatattgaataagaaagctgatgaaaagataatatcagaggttatggacgcagtgctggatgatattgttaagcagtgatgttgctaagacggattggagaagaagttgaaaaagaaaaataaagcaatttacctgctgtttcttatgccattcgtgtattttgcaacagcatgttttgttatgtggcttgtaaagacaagtggaatatatccttctggttcggatactatgtatcatgtgtacagaggagattatgtatataatgcgattaaatcgggcaacttgtatcctttatatgatcctgcatggtataacggcgtggagattttaaggtattggtctccatttcctgcttatgttatggctttttgtcagtatcttgcgggtggaagccagtttggtgcatatcttttttatataggaggagtgtgttttttaggcgcatgtgtatggccatttatcggaagaggctttaacagaccttatctgggagcatttatcggactcctctggttctttatgcctaataatctgtgtgcaatatttatagaaggaaatcttgccagaagtctcagtatgatatttttgccggtattcatatattctgtatataaatatttatacaatcataaattaagatacataccgcttatggtatttacatttttacttatggaattgtgtcatcttggatatgctggaatggtggctatagctgtgattatatatggaattgtttatatgatacagaagggcagaaagaaggcagtacttgatgttgtaatatcaatgatttttggatttatgctgcttggaatatggctggttgcgtccttaagaggtggaataacttcacttgataattctgaaaatatggctaatttcttccagaatttatggataacaattaatccttttgaaagattaacaagaggttttgaatatttttatttcggatttgcagctttggttgttattgtatttggcattttatttggatataagaaatcgagaacaggttttgtaacagggcttattatactgcttatgacaactaaatcagcatatgccgttttgaagcacctgccgggaagccagtatttatggatgttaagattcatatccattgcattatgtatgattcttatgagctttcttatgtgggacaggctaaagaagcctctggttttgatgctttgtgttttactggcggtagatactataccatctttaagccttattgttggtgaacataatgatatatctgttcaggaaagaatggcagcaagacaggacagtactcttatttcaaatgctcagacaatcactaagcagagacttgccctgatggacgagagcatactgggggcaaccggttcatggctggtttctgattatggcaatccggttgatgctacatttggtgcaggaagagaagctgctaatacatctgctaatatagttaatcttaacaaagcatttgcacagggaaatttcctgtatgtcttcgacagatgcttagaactgggggatgattctgtacttgtgaaaaaatcattgcttaaacaatataataattctttatatgatcttgaagcagctgcgaatacggttggatataagaaagtggaacaaaacagtgattacattctttaccatattgaaacacctgacagctggggtgttgtcagcagttacagagcagttgcgataggttctggggcagcagcaatatcaatgcagttccctgcggttgaaacagtagattctgctaatcttaatgattacacatatgaagaactggcgggatataaagaggtgttcctgaatggttttacatatgatgataaagaaacagcagaagaccttgtactacgcctaagcagagcaggtgtcaaggtgatcatatatgccgatggcataccacaggataagcgtacccacagtcagaatttccttggcgtaacatgcagttcgataacatttcacaatggatatccggatatggatacaagaattggaacgatatatccagatatgtttccacagggacatactacatggaatacagtgtatcttgatggacttgatactgtgtggggaactttttatgataacggattaaatctcgatttttatgggactgtgaagaacgacaatattataatgactggccttaatcttacatatttctatagtctgactgatgacgtatctgttggacagttgcttagtaatatgagtggtatatcatcagaggaacttccagacagaaagatagttcctttaaaggtggaatatggaaataataagattacaattacatctaataatgataatgttaatacaacacttgcatatcacgatatattcagctcttcaccggatataacacataggaataatcttatgtatgtgaataagggaacaactgttattaaaatgagttatccgcatctgtggcagggggctttagttagtactgcaggagttgtgttaatggttgtgtggctgattgttaaaagaagaaatgaacataatatttaacacaaacgcaccgtaagtatgttagagatatacttacggtacgttttatttatgcacaattaatttaaaatacctttaacgtacaaaaagatatgccgtatatcccacatacataagaatacatgcagcaccttcccatctgctcattgtcttcttggtatatgcgaagagaaataatacaattccactggcaagaagtatgatacagtcaataagtgattcagaaagaacgtgaagaggctgtatcgcagcagacattcctaagataaataatatattgaatatattagaaccgattgcgttgccgagcgcaagcccgctgtcacctttccttgtggcaactatagaagttacaagttcgggcagggaggttccgattgcgactattgtaagacctatgaaattctggcttacaccaaagttagcagctatgatacaggctttatctacaacaagattaccaccgaatattacagctataagaccaccggcaatataaagcagactcttaggcagaggcattattttacaatcctcagcttcttccctgtttttaagtgctgatattatcatgcatgtgatgtaagctgccattccggcaaggagaataatgccttcaattcttgaaagtctgccatcaataaacataaagcaaagaatagcagttattatgatattaacaggcatatcacgcttgagaatgtcacggttagtagaaaatcctgcaataaatgcacagatacctacaacgacaagaccattaaaaatgttagaaccaacaacattgctgattgcaatgtcattactgccagagagggcagcgttaatactaacagatgcctcaggggcactggttcccattgcaacaatggtaagtcctatgataacgcttggtactttaaggattttggcaagggaagaacttccctccacgaagaaatccgcgccttttattaatagcacgaaaccgatgagtagtaacaaatattccataataagctcctttcttgcgataaaggaatggaataatataaaaagagacctttatcgcatcaaaaatgaattgataaaagtctcgttaattgtaataataaccggctgttcagcgtgatgacgattactattgcaccggatacgatgctaactactccctcttattaacattatactaatatatatatataaatgtgtcaattaaatattataattcagattatttttcacagagtgatataaaatactcatgaattcttgtgtcacctgaaagttcagggtgaaatgcaagaccaatctggttattatattgaacagcaacaattctgttatcaatagttgcaagaacatcaacattatcattaactgatgaaatgtatggtgcacggataaatgtcattggaaattcatcaaagcccttcatagcagcagttcttacaaagcttcctaactgtcttccatatgcatttctttttacagtgacaggcagagttccaatatgtatactgttgtcattgtcaatgtgtccggctaaaagaatcagaccggcacaggttgcaagtgttggaaggccatctgctattgcagacttaattgtatcaagcatatccagctttcttagaagctgtccctgaacagtgctttcaccgcccggaaggataattccgtcaataccttcaaggtcttttttttgacgtatttcaactatttcatgtccgattttttcaatgatatgttcatgttcaatgaatgctccctgtacagcaagtacgcctattttcatattatctgcctctttcttccatgattatctggatttcaccaggattaataccaaccatggcttcgcccaaatcttctgataatttagcaataagtgcagcatctgtgtagttagtgacagcctgaactatggcagaagctctcttagcaggatttccagacttgaatataccagaacctacaaatacaccttcagcacctaactgcatcataagtgcagcatctgcaggagtagcaacaccgccggcagcaaagtttactacaggaagctttccattatcatgtacatagagaaccaggttatatggaacctgtaactgttttgcttcctcgaaaagctcatcatttcgcatagatgttatctttctgatttcagaattcatctttctcatgtggcgtacagcctgaacaacatccccggtaccaggttcgccctttgttcttatcatggaagcaccctcattgattcttcttaatgcttctcctaaatctcttgcaccacatacgaaaggtactttgaactgggttttatcaatatgatatatatcatcagcaggagataatacttcggattcatcaatatagtcgatctcaactgcctgtagaatctgtgcttcaacaaaatgaccgatacggcattttgccataacaggaatacttacagcatcctgaataccttttatcatcttagggtcgctcatacgcgaaacgccaccggcagccctgatatcagcagggattctctcaagtgccataacagcacacgcgccagcggcctctgcaatcttagcctgctcgggagtagtaacatccatgattacgccgccctttaacatctgtgcaagacctttgtttaattcatattgtgaatttgttgtcataactgacctccttgaaaatgaattttatgaattgattttcacatataatattgcacaactggtcataaaggaatatccaatttaataaaaatgtcacatgccagtataaggtcagaatagatcaggaatatggtcagatgaaaactgattataaaaaaattgtcgaattatgtcgtacgaaaactgtcagtctgattagtaatcagcagctttttgtattataatagaacatattttaaaaatatgtaggagagggaaagtaagtgcgtaggattaaaagttttttgattataatatgtctgctaagcatatatacagcttttttatatgggtgtgaaagaaaagaaaggtcagacagccacaataatgaggctggattgccggaaatagtcataggaagtgacaactatccgccatataattatgtcgatacagatggcaatgctaccggaattgatgttgagcttgctacggaagcatttaaaagaatgggctataaggccagattcatatatattgactgggaggataagaagaatcttcttgctgacagaacaattgattgtgcatggggaagctttagcatggatggcagggagaatgaatacagatgggcaggaccttatatgatcagccgtcaggttgttgctgtgaatatggaaagtgatatatattctcttgaggatttggaaggaaagacgattgcagtacagactacaacaagacctgagaagatatttcttagcaagactgatgagcgtatcccggctataaggtcattaatagctttgcagaaaagagaacttatatatccttttttaagcaaaggctatgcagatgctctggcagctcatgaaactgcaatatgccagtacatggaagattataatattaagttcaggattcttgacgaaccattagagacagtaggactgggagtagcatttgacaaaaatgatgaccgtgggatagagaagcagcttacagaaattcttaaccagatgaggaatgatggtacagagaagaagataatcagcagatatatttctgatgctgataaatatctggaggtggacagttatgggaaataataccattaccagaaagaaaagaaaaagaatatggccgattgagattatagcaggtctgtttataatgatgattgtgttttttattgctgtaaatgttgatataaaaactacacaggaaacactttcagatactgcgcattatatcaatgaacagtgcaacagctttacaagacataatcttgcgtcagaaaccaagagcctgctcagggtaattgaaagtgcgcagcagataaaacataatatcacatatgaacgcagcctttcagataaagatatatttacagaagaatttatcaaaaagaatatgcaggaatgttatctgacggcagttataatcatggattcaaaaggtaatcttatagcacaggaatatacagatgaatatggtgcagatgagcttaacgaatatcttgacagtacttcacttattgatgttgttgataatactgaaaaaacatacgcaataagaattgactgtgaagatggttcatatgttgaccttgcagcatgtggtatggcggattcaagtgggatagttgttgtttattaccacacaccggcagagtatgttaataattacaatctttcatttacacatatattatcaggttatgatgacagggaagatggaaagattgttgttacaaagggaaatcagataatagcttctaatgatgacagtatggttggtgaagatgttgacaaatataatgtaattaagaagataaaggagaccggtgcaagtggaaaaatagtacatgctgatagtaacagaaggtggggctcgcataattatggtcttatggaacgtggcagagattattatgtatatgtttatatgccggaaagaaatgtttttaagacaacaccaagaaatatgcagtatacatttgttgcctatatgtttgctgtactggtacttaatatgatgcgctggaaaacggttcagggatatgagcgtgaacagtatgaaatgcagcagcagtatgcaaagacactgcaggaaaaaaatgaacagctacaggaggcagtacgccgagaggaaaaggctaatgctgccaagactgatttcttatcaagaatgacacatgatataaggacgccgcttaatggtataatcggattgttaagaattgatgagagccataaagaagatacagatatgattaatactaacagaaagaaaatgtcaatagctgctaatcatcttttatcacttattaatgacattctccagatgagtaagttagaggatggccagattgagctttcaagagaaattgtggatcttaacaagcttgcaaaggatattattactatagttgaacagcgtgcctcagattcaggtgtcaatcttaagtatgacaaggttgcaggaaaagttatgtatccatatgtatacggaagtcctctgcatttacgccagttatttctaaatatatacgctaactgcatcaaatataataaagcaggaggaatggtttcaacatattttaaatgtattggaacacaggatggaattgttacatatgaatggactgttactgacacgggaattggcatgagtgaagaatttcttgaacatatatttgaaccatttgtacaggaaaagactgatgccagaagtgtttatcagggaacaggacttgggatggctattgttaagagtctggttgacaaaatgaatggaacaattagtgtcacaagcaaggaaggggaaggctcaacatttgttatcagaattccttttgagattgcaagcaaagctgaagaaacgaatgtcgataaggaaaagagcagtaatgatatttcggggattaagattctgctggcagaggataatgaacttaatgcagagattgcacagactcttctggtggatgaaggcgctaatgttactgttgtcagtgatggtgagcaggctgtcagggaatttacaaggtgtgcaccacatacatatgatgtgattcttatggatattatgatgccaaagcttgacggaattgcggcgactaaagctataagagctattgaaagacctgatgctgtggagattccgataattgcaatgacagccaatgcatttgaggaggatgccagaaaatgtgttgaagccggaatgaatgctcatctgtcaaaacctttacagatggatgttgtagttgatacaattgcacagtattataaaagatgattatgcaggataaaggagtctctgcataatacaataactgataaaaggggatagctatgatatgtagtaattgtggagcagatataggagataacgagactgcatgcccatattgtggtgctatgcagtatgagaattctgaacagaagtacatgaaagacctgtacaatctgaatgaaggaatggagaagctggataagaataccagaaaatacatcataaaaagtacaatgaaaagtgcaggtatagtatgtgcggcaatagcggcagcagttcttgccggaagtatgtttggatatggttcatataagagtatgtataattcttcacataacaggaaagagatacacaagtcattagattggtacaataataatataggtgaacttaattcattatatgaaaagcgggactatgcaggcatttcagaactgacagatagttataagggcagttcaagtgttttggaaaagtggagtcattacaattttattaatatttatgattattattataaaagggtggcagacatctacattatggttcataaaggcgaaaaactgagtgattatcagtttggaacaggctttgaagagtcacttgacatgatatatttcattaataataaaaacggatataattaccgtaggtatgagggctgtacggcagaagaaaaagaaactgtggacggctgggttgcagaagcacagaattatcttaagaatgttgcaaaggcgacggacaaagaaattaatgatatgcttaataaattgtatcagaatggctattatgattacaagattggaaagagctacgaagagtcattttataaaaaatataatgagggagggaacaactgatgaaatgtaataattgcggtgcacctatacagatgaatcagaagttctgtcctaattgcggatcaccaaatgtggaatttaagaagcatattgatgatatggaacaatataataaaaagtttaacagcacacgttccaaagtaattggtaacagcaaatggtttgtgaattatattgcaccaataacagctcttgttataacaatgactgcacttacactggctattattggtaaaaattcaatgattggatatgatattgcaaaaaaaaatcagcagaaatattattcatcccatagtgatgaaatccagacaaaactaaagcttctgttagaagcaggagactatgcaactctgtacagtatggattatgtgggagattgttcaataaaggataatgatgataaatatgcatggaatgatttttacaatgtcgcaggtgattatgtgtatataagaaaaggtataataagtatgatggaaaggaataattcatcatattatggcgacgaatatatgaatacgatttcaagggctgttgctgatatggaagatattgtcagcagacgtttaaatttatcatatcatagtgtatcgaaagaaagtattaagtatataaatgatatatatgaaaaatcacatgaactgttaaaggcatactgcaatctgacagatgaggacatagccggacttcctgatatgtcacaggcagatatacttacactcattacaaggaggagctttgaatgagaaaaaagaagaaatttaatatatcacttctggcttatgtactgtgtgcaattatgattattattataatcccatgtgtttcagatatatcaggtgatgtattcaggagtaaaggaagaatgtcgggctatgaagaagacagtctttataatgattttatagaaaataattatgaagggcttcttgaaaagacagaatataacacaggcataggcaaagatattgataaagatacgcaggactactatacatttgccattgcatataaaaaagctgttgattacagggtgtatgtgaataatggagaaaatgagaaagcagaacaggtggttaaagatatagataatgcacagtttaataatgtgctgtttaaggaagcacttgaaaatgtaaaaaatatatatattagtaacggactgtcacaataatgtgttaatgtaattgactttaaaagaaagataacgaagataaacagaggatgatgaagatgagtaacacaggaaggaataatatcatgaccgacagggtgtcatattattttaaatcccagtggaatatacttctgataataacgatatctggtcttatatacaatctcggacttcttgcaggtccgtggtttgaaggaagaatgacaggctgtcttgttaatatacttggtggaaaatcaacatttacagatatgcttattcttgtaatatgttatgtgattgcaattgcagtagtgcagatatcaaggtatataaaaagattctatgtaagaagattcgctaataatgttaataagaacatgaaagaggttttgtataacagccttgtacataagagcagaccacagtcacaggaagaaggagcgggagatattcttaccaaggctatcctggatgttgatgattgtgctgaagggatgaggaagttcacgactgagatatttgatacgggtgttgcacttgcagcatatgcaggaatgcttcttttctatgactggagacttgggcttatatgtatgatattcccgccaatatcttatatcattgcagagaagatgaaggctgttgtacaaaagacaggtgcagaatataaggtacagtcaggaagacttagtgcggcaacgcttgaaagagcagaaaatgcggttacatatcgtgtatatggctgtgagcaggaaagaaaacaggcgtatgaagataatcttacagcctatgaaaagtcggcagtaagggctaatatatggggaacagcatttcctccgatatacaaggttatagcacttgccggagttatatttatattatattttggaagcagaaatgttctgggaacaggctggaaagaatgggatattgctattttagctacatatgtatcatgctttgcaaagctttctaagaagtcctcacatgcagcaaagctgtttaatgcagtacataaggcacaggtgtcatggaagagaatcaaaccgcttatgaagcatgaaaattatgaagatgcggataacagtgtaaagtgtgactcacttgaagtaaaaggacttacatttgcttatccgggaggccatgatatattcgaaaatgtaacatttgaagcagaaaaaggcagcatcattggtgttacaggttctgttgcatgtggcaagtcaactcttggaaaggtgtttttatgtgaatatccatataaggggagcattaagattgcaggcaatgaactttcagaacttgatgatgcgaaaaaggcgggacttgcagcatatctgggacatgatccggaattgtttaatgatacaattagaaacaatattcttatgggtgatgatgaggatgtggctaagcttcttaaggcagtgtgctttgacaaagaagtaaatgatatggaaaacggacaggacacttatgttgggaatacaggtgtgagactgtcaggaggacaggcacagagacttgcacttgccagaacactctgccataagaagccgttaattatattagatgatccattttcagcacttgataaggacactgaaagagaggtatttgctaatattaaagaatacaccaaggattgtattgtgattcttatttcacacagattatatctgttcccacagatggataaggttatatggatggagaacggaaaaaccatatccggtacacatgatgagattatgaataaatgcccacagtatgcggttctttataatgaacagaagggaggcgcatctgatgaagaataaaagtgttggcagagttatattgaacacaataaaagaaaagtggatgcttacagcaggaattgcaattactgttgttggcgcaattgtaatggcactgtttccaccacttattcttgcaaagattattgatacagttgcatcaggtacaatgcccacattttatatggttcttatgtatttcggatttcttcttgtaaccggttttatggagagtgcaagagaaacttttcttacagtattcggacagaagattacacattcattaaggagtgcgttgatgtataagtacagctgtcttacaacaagcggtcttacaagtcaggagccgggaactgttgtttcaagattcgttggtgatgctgatacagttgagaatttgtttacatcaggaattatcagtatgtttgctgatgcctgtaagataataagtatagttgctgttatatggtttaagaataagggacttgccattgtgcttcttgttattcttccattcctgttcgtattcacaagaattattcagaaaaatatgctggcagcacagattgagaacagaagagctgtaggaagagcatcaggacatgtgccggaaactcttcacaacataagaacaatacatacacttggcaaggaaaattatatggcagaaagatacgatgaatatatatgtgaaagttacgcagcagttgagaaaactaatttctatgatgcagtatattcacctgtaattcttactctcaatgcaattgttgttgctgtggtaatgcttttttcagcatcaggtaaccagacagtgcttgcattttttggcatgtcagcaggtacagcagttgcggtaattaattatatttcacagatatttgctcctgttgagagccttggtatggagattcagactatacagtcagcaatagccggagtacacagaattaatgaatttttcgagatggatgaattatcagttaagaaggattcatacattgcagacaatacagccatggaagctgacagtgatgtgattgtcgatttcaataatgtaacatttgcatatgatgataaaaatgttgtggagaacttaagtttttctgttaaggagggcgagcaggttactctgtcgggaagaacaggtacaggaaagagtacaatattcaagctccttcttgggctttacgagccggataaaggaagcgtatcaattgcaggtcagaaggctacggctattccggatagtgaaaagaggagaatatatggatatgttgagcagacttttcatatggttccaggaactgtcaaagaccagataacactgtatgatgtatcaattactgatgaagatgtaattgaagcagctaaggcagcaggtattcatgatgcaattatggaacttgacaatggatatgatactatatgcaagccggaagatttctcacagggacagtggcagttattgtcaattgcaagggctgcagcagcaaagcctgaactgcttctgctagatgagataacagctaatcttgatgctgatactgagaaaaatgtgcttgatgcattaaacagggtaagcaagaacaggactgttatatcaatatctcacagagctaatgcaaaaatggggagaattatagaaatagtttaattttattaatgtttctactggcttattatgcattaaagaagtataatacccatacaatattatgttcaaatgagaaagttggtatgttttatgaataatagatgggttaaatatttaatggcaggttctgttacagttcttatggtgctggtgataatatttatcatcagatctgttaaggagaacagtctggcggtgtcatgccctgatactttagttgttgagtatggaagtaccgatgatgaagcggatattaatgaaactattaagaagaatgtacttagaaagaaagataataagacaaatatagagattgagggaaatgttgatgtcacaaagcttggaaagtatgacattaagattgttgcgtcaagaaagaagaaacatatttctagaaaagtagcagtaaaagttgtggatacccaggcacctgttatcagtctttcaggagatacagagattaccttagaagccggaagtaattatgaagaagcaggattttctgcagttgataattatgatggtgatattacagataaagtggagacttctgcggaggttgatacatatacgaaaggggatactacaattgtatattcagttaaagattcttctggtaatgaagcatttacagaacgtgttatacatgtagaagatactacagctccacagatatcacttaccggtggtgaggtgtattatatcaggatgggagatacatatagtgaaccagggtatacagctgtggatatatgtgatggagatgtaactgacaaggtatcagtatctgggaatgttgatacagctaatgcaggaaaatatacagtaacatacaatgtatctgataattgtggtaacgaatctgaagtgcaaagaactgtgaaggtagttgcaccaatgtcagatgatgcagttaatccgggtgataaagttgtttatctgacttttgatgatggccccggaccatatacagaaaagctgcttgatattcttgacagatataatgttaaggcaacattttttgttactaatggaaaaccggattatcagaatcttattgcacaagaagcacagcgggggcatactgttgcaatacattcagcatcacatgattatgcaaagatatatcagagtgtagatgcatattttgcagattttgacgagatgaatagtattataactgcacagactggaaaagcagcagatcttgtaagatttccaggtggttctagtaatacaataagtaagaaatactgctatggcataatgagccagcttgtatgtgctgttgaggaacgtggattcagatattgtgactggaatgtttctagtggagatgcaggtggaacaacaagcacatcacaggttgtggctaatgttatagcggggattaaaggtaataatgtatcagtagttttgcagcatgatataaagaatttcagtgttgatgcggttgagcagataatacagtgggggttatcggaaggatacacatttttacctataatatcaaccacaccaatgtcacatcatggcgttaacaattgattttaaagtaacttgaactatatatattaataactggtggatttgttattggtattgtgatataattttattatattggaagtacggacgtatatgaggagagaaatcgttatgggaggctgttatcttggaatggcagggcatgatgtgtttaacaatagagtgcgtgagattgtgaacactaatgaacacagggttgttctattagctctggacataagtaattttaagtatattaatgatttttacggtatggatgaaggcgacaaggttatgcaggatattgcagacttttattttattaatgaaccattgtgccttgcttcacacggaatcgggtttgaccagttcaggggtgcctataaagctgataatatgacggatgaagatgtagtagaatatattgcaagaaagaaccgcattttcgagaaagaattgtcagaaagatatcctctggtgtatcagcatgtttatgttggattatatttttatgatgatccatcacttgatgtacgtatggcggttgaccgtgctaatcttgcaaagaagtcaacaaaaggaagatttgacattccatgttgtgtatattcagcggataattgcaatgaatatcttgaacatatggatatgtctaatgaatttgtgagagcgtgcgaggaagaaagaatagaaattttccttcagcctaagatatccgtatcgcataattgtgttgcaggtgcagaggcacttgtaagaatgaagacaagagcaggcgagcttgtttcaccagccagatttgttccagtgcttgaacatacaggaatgataggaaagcttgatgacattatgcttgataaaacctttgctttccagagacaatgcattgataagggaattaagcctgttcctgtctcggttaatatatcaaggcagagatttacaagtgaagatttgttaaaatatatgcttcggctgcaagataagtatcagattgattcatcacttattgaacttgagatacttgaaacaatatttattgatgcactggatgctatgattgatgttattaatgcattaagggcaaagggatttaagattaatgttgatgattttggctcgggatattcatcacttaaccagattgccaatattcctgctgatattattaagtttgacagagtatttgcgagcaggtcattaaagagtgataaaggaagacaggttataaagtcactgattgagatgcttaagatggtagaatatgaacttgtatttgagggcgttgagactaaagaggagctcgatacagttgtttcttatggttgtgatgttatacagggattttattttgacagaccacttcctgctaatgaatttgttaataaatattatactggcagcagggagattactaatgggacatagtacggacattaatgggaatgaacatttgcaatatatttttaatgactataagagtggtatagaacatgggattcttgttgctaaccttacatatgagcttgctaagagacttaagcttgatgaacgggaatgttatgaactcaagattgccggaatgatgcatgatattggaaaacttaaattatcagaatacttatatggcagaaattcgggcgaattatcagtcgaagagatgaaatatatgagaatgcactctaaaatcagctttgatgtattgaaaaattatgattattcagataatataatgaaagttgttctctatcaccatgagtgctacgatggaagtggttatcctgataatcttaaggggacagatattccattgggtgcaagaattcttaaggtgacagatgaatttgctgcgctgatatctgaacggccgtataggaaagcatttgacattgatacggctgtgaatattcttattgaagagattaagaatcttgatatgagagtatttattgagtttcagcgaatgattcacgaggaagaaacatttgagataataagaaatagtaaggtagacttagaaaatcttagtcttgaagatattctatccttcgcagattagtatttaattacaggaaagaggtaaagtaagatggcagagtcaatggttggcttaaagagatcgcacagatgtacggaggtttcatcagctgatattggtaagaaggttactgtaatgggttgggttgccaagagaagaaatcttggttcacttatttttgttgatttaagagacagaagtggaattctccagattctttttgatgaaaatataattggtaaggaaggcttcgacaaggcatatacacttcgtaatgaattcgtaattgctgttgagggtgaagttattaagagaagcggtgccgttaatgagaatttaaagacaggtgacattgagattgctgcaaagactttaagaattctttcagagtcagagacacctccattcccaatagaagaaaatatccagaccaaggaagatattagacttaaatacagatgtcttgatcttagaagaccggatatccagtctaatattattatgagaagcaaggttgcaactcttacaagagcatttcttgcaaaggaaggtttcttagagattgaaacacctatgcttactaagtctacaccagagggagcaagagattaccttgtaccaagtcgtattcatccgggtaagttctatgcacttccacagtcaccacagctctttaaacagatgcttatgtgttctggatatgacagatatatgcagattgcaagatgtttcagagatgaggatttaagagcagacagacagcctgaattcacacagattgatatggaattatcattcgtagatgttgatgatgtaattgatgttaatgaaagacttcttgcatatctttttaaagaagttcttgatgttgatgtaaagcttccaatccagagaatgacatggcaggaagctatggacagatttggctctgataagccggatttaagatttggtatggaattacagaatgtatcagatatcgttaaggactgcggattcggagtatttacaggagcacttgagaatggcggttctgtaagaggaatcaatgcaaagggacagggaagcatgcctcgtaagaagattgatgcacttgttgattttgctaagggatatggtgcaaaaggtcttgcttatattgcaattcacgaagatggttcatataagtcatcatttgcaaagtttatgacagaggatcagatgaatgcccttgttaaggctatggatggtgaagctggggaccttcttttatttgctgctgacagaaataagattgtatggaatgtactaggtgctttaagagtagaacttgctgatcagatgggacttcttgataagtctgattataagttcttatgggtaacagagtttccacagtttgaatggtcagatgaagaagaaagatttgttgcaatgcatcatccattcacaatgcctatggatgaagatcttgatatgcttgaaactaatcctggtgcagttcgtgcaaaggcttatgatattgttcttaacggaacagaaatcggtggtggttcagtaagaatccatcaggctgatgttcagagcagaatgttcaaggcacttggacttacagatgaagttgctaatgaaaagttcggattcctgcttgatgcattcaagtatggtgttcctccacatgcaggacttgcttatggtcttgacagacttgtaatgcttatggctaagagagattcaatcagagatgttattgctttccctaaggtaaaggatgcatcctgtctccttactaatgcacctgatgtagtagacgctaagcagcttgatgagctttcaattaagattgaagaagagaaaactgaagagtaatatataataaaagccctgcactcatatgaaagtgcggggcttttatttatgatatttataaaaatgttatttaatagtaatctgttcaacagatgtatcagcaccgcttgtacttactctgtaaaggaccccctgatcttcataatactggaaaaatgtgtattttgatgtgcagtgaatgttggtaatattgcctatagcaatagtttcaatctgcgttccatcaatattcatcctgtaaagtccggtcattccatctgtgctttccacctgaaaaaatattttgttgccataaacattataattaacgactttgtttcctttttctccatataataattcaagagttttgttagatgtattaagtcttacaagtgaataattcttgcttaagtcaatgtaatatgcatagccgttctcaacatctgcaagatatgaattgcaatcatataacacagaggtcttatcagttttggtatcgtaacttaatatgttatgttttccggcaggatcagaaaaatatattgttccgttatggacgcacgcaggtgagtaaggtgtgtcagaaattttggtatctttctttcctgcaatgtctactttatgaaaagccagaggtgttgtgtcactataatgctggtagtataacgagttaccggataaggctattgttccggaaagactgtcgtataatgctttcagtgactcaccgtttaagtcacagcggtaaacaccgaatagctgtcccctgaatattgttccgatggtttcctgcttgaaattattcttgacataatatatgtaactgccacagacattgattgatgcaacactgtcatcatttaatttcatggcattagtgcagtctgaattcattacatataatttgttgtaatcgtatggattggcaaaatatattttgtcattgtattcgcagaacaagcctccgttattgaggttacctgctgaattgccgatagcattatcgctgttgtatatgatgcggctgcttcggatagataaaaatattgatactgcgagtaataatcctattatggttattacacttattgtgatggcttttttcatatgttatcactactcccttatgaacattatttaagaacattttcttaagtataacataaagtacatttattgcatatcattaaaaatgtgatacaataagaacaatacatcgctttaaagaggagaagtatatgttagatcttaatgaaatacgaaataatattgataaaatcgacagtcagcttgttgaactgtttgaagagagaatgaaactgacaactgaggttgcagaatataagattgagacaggaaagaaggttcttgatccggcacgcgagaaagctaagttagaatctgtcaggaagcttgtcaggaatcccgataatgttcatgctattgatgacctatttgcacagattatggctaactcgagaaagaatcaatatatgcttcttgaaaagatggggcagactttaagagaaccatatgaggcaattgatgagattaataaaaagaactgtaaggttgtatatcagggggtgccgggcgcatattcatacgctgccatgattaatttctttggtaaggatgttgataatttcaatgttcctacatggagagagtgcatggaggcagttaagcttggaaaggcagattatgcggtacttcctatagagaattccaatgccggaattgttgctgatgtgtatgatctgttacaggaatataataattacataatagcagaaacttatgttaagattgaacatttgttgctaggacttccgggaactgaccttgaaaatgtaactgctgtatattcacatccacagggacttatgcagtgtgacagattcttagatactcacaagagctggcagagaatcagtcaggctaatacagcacttgcagcaaagatgatttttcaggagcataataagactcatgttgccattgcgagtaaggaagcagcagagctttatggtcttgatatcttaaagtctggaattacagaccaggaaggcaatacaacaagatttgttattgttactaatacaagaaagttcgttaagaatgcacagaagatgagtattgtgtttgaaacagccaatgaagcaggcactttatataatcttttaagccatattatatataatgggcttaatatgaataagattgaatcaagacctattgaggggaatgttgaaggaaagagttggaatttccgtttctttgttgattttgcgggtaatattgatgatccaagagttatgaatgcattaagaggcattgaagaagaagctgaatctattaagttgctaggaaattattaatgtgttagaattataaatatgtcgtcagacaataagctattagataagtgagggaattaaagtgaatttagaagaggcaaagcttaagctttcaaagtacggtcaggaacagatattgagatattttgatgaattatcagatgatgagaaggcagcacttcttgagcagattgataagactgatatggaagttttatctgcaattgaacataagtctgagcttgttaagaaaggtgagattacacctcttgatgcaatggaactggatgagataaaagctgattatgatacatttaagaatacaggtgtagaggcaattaaagctggaaaggttggcgcaattcttcttgcaggcggaatgggaacaagacttggttctgataatcctaaaggaatgtataacgtgggagttaacagggaactttatatattcgagtgccttattaataatcttatggatgttgttaaagagacaggaacatatatacatttattcgttatgactagtgagaagaataatgacgctacagtttctttctttgaagagaagaatttcttcggatataagagtgaatatgtacatttcttcaaacaggagatggcagcagctactgattatgatggtaagatataccttgaagagaagggaaggatggcaacatcacctaatggtaatggtggatggtatatctctttaaagaaggctggattaacagaggttcttgagaataacggaattgagtggctgaatgtattcgctgttgacaatgtccttcagagaattgcagaccctgtatttatcggtgctacaattgaaaagcactgtgcagttggttctaaggttgtaagaaaggcagctcctgatgagaaggttggcgttatgtgtcttgaagatggcaagccttctattgttgagtattatgaacttactaaagagatgatggatgctaagaatgcaaagggcgatccagcatataatttcggtgttattcttaactatctgttcagagtttctgaccttgaaagaattgttggaaagaatcttccattacatattgttgagaagaagattccatatattgacgagaatggtaatcttgttaagcctgaaaagcctaacggatataagttcgagggtcttgtgcttgatatgattcatgagcttgacagttgtctgccatttgaggtagtaagagaaaaagaatttgcaccaattaagaatgcaacaggtgttgattcagttgagtcagcaagagaacttctaaaaaagaatggtgttgcaatttagttctttttgttgtatgttattaataagcgctgtacaactggcggaagatgcataaagagcattgtgggataacccacagggagtacagtttatattaagaaaagccgaccgcctgggcaacgttaagctataagctgcgttcccaggcggttttttgcatttgccgcatgcggcaaattagtagcgatgagaataggagcgaacgcagtcatcacatttaacaggaggtcagttatgacaattaagaacctttcagaggaattatcaggatgtgcttatccgggcagaggaattgttgccggtatgtcagaggatggtaagaaggcggtttcagcttactttattatgggaagaagcgagagcagccgtaaccgtgtatttgtacaggacggagagggtatcagaacagaagcttttgacccatcaacacttttggttgcaccagagcttattatctatgcccctgtaagagtacttggcaataatactatagttactaatggagaccagactgatacggtttatgacggcctttcagaaggtaaaacatttgaggaatctttaagagtaagaaaatatgagcatgatgcacctaactatactccaagaatttcaagtgtgcttcatattgagaataatgaatattcatatgcaatgtctatattaaagagccataatggtaatcctgacatctgtgaaagacacacatatacatatgatgcagcatttgcaggagaaggacattatatccatacatatatgggtgatggcaatccacttccaagctatgagggagaacctacatgggttaagatatctggtgatatcgaagaattcacacagatgatatgggataatcttaatgcagataacaaggtttcactttttgtgagatatattgatattgctacaggtgaatatgaaacaagaattattaacaagaatgtaaagtaattaaattaaggagaaagaatatgaacgaatttcagttaaaatacggatgcaaccctaatcagaagccttcaagaatatttatggaagatggaagagaccttcctgtagagattcttaacggcagaccgggatatattaattttcttgatgcatttaacggatatcagcttgttaaggagttaaagaaagctacaggacttccggcagcaacatccttcaagcatgtatctccagcaggtgctgcagttggacttcctcttacagatgttgagaagaagatttactgggttgatgaagcaatcggagaattaagcccaatcgcatgtgcatacgcaagagcaaggggtgcagacagaatgtcatcttttggtgattttatatcattatcagatgtatgcgatactgctacagcaaagcttatccagcatgaggtttcagatggtattgttgctcctggatatgagccagaggcacttgagatattaaaggctaagaagaagggcaattacaatattattaagattgaccctgagtataagcctgaaccaatcgagagaaagcaggtgtttggcgtaacatttgagcagggaagaaatgagttcgttattgacaaggaacttttatcaaatgttgtaacagagaataaggatattccagagtctgctaagattgatatgattattgcacttataacacttaagtacacacagtctaattctgtatgctatgtaaagaatggacaggcaattggtatcggagcaggacagcagtcaagaatccattgtacaagacttgcaggacagaaggcagataactggtatctgcgccagaatccaaaggtccttaatcttccatttaaggaaggcgtaggccgtgctgacagagacaatgcaattgacctttatattggtgatgagtatgaagatattctcaatgactgggagagagtattcacagagaaaccatctgtatttacaacagaggaaaagaaggaatggcttgcaggcaatactgatgtaacaatcggttcagatgcattcttcccatttggagataatatagaaagagcttataagtctggtgttaagtatgtagcacagcctggtggttctgtaagagatgatcaggttatagaaacagccaataagcgtggaatggctatgtgctttacaggaatgagattgttccatcattaatacggagccagtacataaaaatgttgataattactcatattcattgactttagaggtcttatttgttaaaatttactcaattaatacatgtaacaattgaaaaagaggtggtttaagcatgaagattcaagattttgctgatatggagaagtttgaatcaattatgtctgactgggctgtggcaacaggattagctacggttgcagttggagctgatggaaagtatatttccgagtgttacaactttacagatttctgtataaagcttaccagaggaagtaaggaaggatgcagaagatgtgagaaatgtgatgctgaaggacaaggtgtatatcattgtcatgctggacttgtggattttggtattccgcttaagttaaacgatggtacggtacttggctctgtaatcggaggtcaggttttacctgagcatccgaatgaagagaaattcagaggtgttgcaagagaactggggattaatgaggatgagtatattgaggcgttaggaaaagttacagtaagaacagaggcagagattaatgcagcagctaacctgctaggagcagtacttaataattttattaattcagaatataattctaagtataatggacaattgattacaaagcttacaagtggtgttaagagttgtgaagaatatgtgagagatatcaaggagaataccaagcagcttgatggtatccagagaaagcagaatattcttgcacttaatgcatctattgaggctgcaagagccggcgaggcgggaaaaggcttttcagttgtagcattagaggtaggaaagcttgctaagagctgtacagatcttaataacagaataacctcaactgtagaaaatatatatgatgttatacataatatggcagatataggtaagagataaagaataccagcgggtaattacatatagcgaatgtcaactgcaagatgcaatttgttgacattcgctattttcagttctataatcaaataaaaattttaaaaagaggtatatcaattatgacaccattagaacttgctgaagagattattaatggaagaagaattacaaggcaggacgacttatcctttttcctggattgcgatttggatgaactttgtgaaggggcagacaggataagaaagcattttattggagataaggttgatttatgttctataattaatggaagaagcggcaaatgtccagaggattgtaagtactgtgcacagtcagcacataaccatacagattgtgaagtgtatgattttcttccggaagaggatattgtaaaagcgtgtaagctgaatgagtcagaaggtgttgaccgtttttcgattgttacagctggaaaagctcttactggtaaagaatttgaaaaggctgttcatgcttatgagactatgaataaagaatgtgatattgagctgtgtgcatctatgggatttcttaatgcagagcagcttcacagacttcatgaagcgggtgttaccagttaccaccataatattgagacttcaagaagaaatttccctaatatatgcactacacatacatatgatatgaagattgaaactttaaagcttgtaaaagcagaaggtatgtgggcgtgttcaggtggcataataggaatgggtgaaagctgggaagacagacttgatatggcgataagtcttgcggaagtcggagttgactctatcccgctcaacacactgatgcctattaagggtacaccgcttgagaatgagagaaggcttacagagcctgagatattaagaacaattgcgttcttcagatatatcaatccggaggccgatataagacttggtgcaggaagagcacttcttacaggagatggaattaaggcatttcagtctggtgcgtctgctactattacaggtaatatgcttactactgttgcatgtgctacaattagaagcgataaaaatatgttaaaggaaattggaagagagacaaaataatgaaattaacaaaatatttgaaaaaaggaatggctgtgttacttacagcgacattttgtgtgggattatcagcagggctgacaggctgtgggaaagacacggctaaaaaagattctaaggatattgatacgtttagaataatgattgcaccgtatcaggatgctgataccctgcttacagggcttgagcctcttggcggcatgattaaagatgaacttgctgcacaggggtataatgtaggcaatgttgagattacagtaggaacttcttacagtgcagtaggagaagctttaagcgccggaacagcggacgcaggctttatttctggcggaacttatgttacatacgatgatgactgtgatgtcctgcttactgcacagagaaaagctattaacaaggattctcttaatgccagggactggaatgacgggacggaggaagcatttacagacaatcttacaacatactaccgttcaataattcttgcaggaccaagtactaagggacaggagcttgctgccaaggtcaatgcaggacagaagcttacatgggatgatttgaacagtgcaacatgggctgtaatgggggcttcatcagcatcaggttatatatacccaagtctgtggctttacaataattatggaaagcagataagcgaccttgccaatgtcgtacagtctgattcatatacaacatctatgtcaagacttgcagcaggacaggttgatgttatcgttggatttgcacatatgagagcaaaatatgctgctaactggatgagcaaatttggtggtacagatgattgttataaacagactgcagttttggcagtgacagatcagataatggatgatacaatatgtgttagtaagaattcagatattatgtcagaaggctttaagaaagcatttgcagatgcttgtattaatataggaaaaagtgaagacggacttaaagttttgaatgtattaagccatattggatatcagtatgcccaaagctctgactatgatgcagagcgtgcggcgcagaatatgttaaagaaataattcacctttaagctgtctgggaggacaatatacatgttacagatagacagtgtaagtaaattatataaaggtggagacaaagcccttgataacattagtttttcagtagaacagggcgaattcatatcagtaattggaaagagtggtgctggaaagaccactctttttcgcttgcttaatggaatgattaagccaactgcaggccgtattattattaataaccaggattttacaaagcttaagggaagaaagaaaagagatattcagaaaacaataggcactatatatcaggatttctgccttgttgatacaattacctgcttagacaatgtgcttaatggggcattggcagatagaaatgcttttcaggcacttttgggtatattcactaaggaacagaaggaatatgcaagaaagcagcttgaagcagtgggattatctgaaaaaatgtattcatatgcgggaaaactttctggaggacagaaacagagagttgcaattgcaagggcactaatgcagaagcctgatattattcttgcggatgaaccggttgcttctctagacccatatagtgcagaacagattactgatattcttgtacagcttaacaggcagtacaatataacggttattatgaacagtcattcggtagagcttgcattgaagaaatcggacagaattataggaattgctgacggcagacttgtacttgataaaaagtcgtcagaggtaacagatgagaatattgaattcatatatggtggtgcgtatgaaaagcatgaatagaatgaaggttatcagaagaattactacactggtaatgctttttataataatattctgttttgctgtaacaggctttgatatgaatgtgattataaatagaggcagtcaggctgtattattcataaaaagaatgttcccaccggatacaggatattgtggtaaggttatagaaccacttattaagactgtgcagatgtcaattgcgggtacatttataggtgctgtgtttggactttttactgcatttttatatgcaggcaatcttattaagaaatcatatgtaaggattgtggtgagagttattgtacagtgtgtaagaacaatacctgtgcttatacttgcacttgtagcaacatttatatgggggcttggtgcggcagcaggaactattgcaatagctgtatcgacatgggctgtaatggcaagaattggtggtgaggatattgaaggcctgacactgaagccatacgaagcagttacagctataggagcaggaaaatttaaagcattttcacggacagttattattgaactgctgccgggatatcttagcaattcactttatgtactggaagctaatataagacatgcggcaatacttggctatgtaggtgcaggaggaataggactactgcttaatgaaaagataagctggcgtgaatacagcagggttggaatgattcttgttatgctttttgtcgcagtgcttgtggttgaaggaataagtacattcctgaaagcatatcttgatggacgtattaagagaaatacaactgcaaatgtgattataagtgtatgtatcatggtattttttgtatacagtctcagtgcagttaaagatgtatcaacatcaaagcttggtattaaggttgttggtgcgattatgcacggaattacacatccggactgggaatacatgtttatgaccggaaagagtggcgttatgtatcttatgcttgaaactattgcaatcgcagttgcgggaacatgtgccggagcagtgtttgcagtaatacttacattgattaattcgagaaaattcgttccagcacctatggcttttattggcaggcttgttgttatggcaataagaactgtacctgtgtatgtgtatgggcttatatttataagggttactggacctggcagctttgccggagtgcttacaatgatgatgtgcagtatcggacttctgacaaagagattcacagttgcagtagataactggaatatggcggcatggaatgcgtgtaaatgtgcaggaacgggatttatagcaagattacggcatgtggcggtgcctgaacttaagttccagtttaaggatgctgtgatgtacagactggatgtgaatgtgcggtcggcaagtacattaggacttgttggagcaggtggaatcggcgccccactgattgtctacatgaacaattacagatgggacgccgttggctcaattcttattgtattgtttgttgtagttcttcttatagaacttctttcaaaatgtttaaagagaatccactaagctttcttaaaacggctgtagtcaataacatatatgaaaatgtaaagaacgatataaagaattattgctccgattacatcgactacagaatgctgctttaaaaacacggttgcaaggcatataaggacgcaaaggattgaagataatgtctttgttattatatgtccctttaaagctttgcaacgcagtaatgcaaaattaactgcaagcgagttgtatacatgtatacttggaaatacatttgttgaagtatctattgtatatagtgcattgattatctttccacagaagttatcgggaatataatcaggtcttaatgtaagaccattaggatatatcatgcatattgtaagagcaagtgacataccgattacaagcgataatgcaaactgtaagaattctttattatctgccttaaaatacatatatatgcacgctgcaaccacatacaaaaaccataatacatatggaattataaaatactcacagaaaggtatcatatcatcaaaaggaatattgatgatatgaagcccgggataatcactgttaataactttttcaagagtcgaaaaccatggaaggtatataaatatatatgctgcaaagcatattctccagccttttcttttaaaaaaatctttcaatattgtacacctctacattttttaatattattagcaaaatatttcaaaattatatcattgttgctgaataaatgcaatataataaggttttgaaggtttacaaaccaaataaatatgtaatataatgatatgacacatttgatgcaggagatttataaatgttacatttgaatcatttgaagaaaagttttggtaagaacgaaattcttactgatattgaatatacatttgaagaaggaaatatatatccggttcttggcggtgcaggagcaggaagaacaactctgtttgagtgtatcgcaggagatattgctgtagattcaggcactgttgagactaaggagaagtgcacgcttttctttgctgcaaagcagagtgttctgcctatgcttattacaggatatcagtttatcagtatgatctgtgatatgaataagaacagcgaaaagcctgaatattatcttgataaagtgaagcttacagggctgataagagacagacatattgcagattacagttttgaggagaagaagaggcttcagttagcagcttttcttattcagaaaccatatgtaatgatgtttgatgaggcacttgattattgtactgatgaatatattgatgatatgctttcagttcttaacgaatataagaatgaccatataattcttatatcaacaggtttgctggatattgcacatagaatatcaaaggatgtgctggttcttaacaatggtgaactcaatcctatatcacatgaaactatgcagattccagagataaaagaagctgtattagacatacttggggaggcagacaatgaaattatttagaaagctgtttgctgagaaaatattacgatattatgagggaacagaggcaggaattaagatgataaagagttttcctgtaataaggaaactggtgaaggatgatgcttttggtgaaaaatcaaaaagcagggctttcgttggaactatggcacagatatttatgcttgcatgggaatttataagaaagttcatgtatgtaattcttcttatatatgttccctatacaatacttgcatatttcttcccactaataaggattcatcaggatatttctataatatatctgtttataatgctttcaactatatgtggaagtcttgctaatacaacaatatttgcaatgggtgacagggattatcttatgattcgtgtaatgcttgttagtccgtatatgaattttctggggaaatttatatataagatagtaacagaatttgtattctattttattatacttataatacttggagaaccggtatttaatgcacttatgttgtgcattgttacagcatgtgcaagacctgtgggtgagatgatggcaattataacatttgaccatttcagaggtgtgtacgaaaacagaagtgtccttaatggcacaataatggctatatgtgtaatacttgcatatggactgcctgtgcttaatggcagaattgcagcaagctggatatatgcaatacatccgtttgttgtctgtgttatgtttcttgttggagcaggcgcaatgtattttctgtggtggtataagtattatcgtgtgataataagagaggcaatgcataataaaagagaattttaattaaagcaggaggacgattatgtatcagaaaagcagaagatttcagacaaaaataattacatatgcagttctggttatattcagtcttcttgttataggagtgtttgtatacagctatgtatctaaatatcagggaaataagctggatatcaaatcacgttatacattttcaataagaattgatgatcaatggaatgttgtatctgatgattatgtatctgattatgataatgataatgtgtctaattttactaatccggatatggttgggcttggaactaaatggcttgaaaaatatatttcacagtacagacagaaatatgtgccatattcaaagtatattgtaaaatcgggtgttgattcggtaagtgtgcttgacctttcaagcaatactgttctgctgtccttctgggttattccgcagaatcttaattcggattatttttcttcgtgggaaggtattcaggatgacggaagaataaaatgtgagtgggtggtttcattttatcttgataacaactatgataatactgcgaagctttatgttacttcagtcatgagttcagaagactatggactgaaacagtattatgcacagcagggaatcgattcaggcggagatacagagattacaagtaattctaacaaggatcagcttgctaattattcaataaaggataattcacttcttgtcacttatgatagagaaaaatatatttcggttcctgtatcttattcttatctgttgtatgagcctaacagttcaacaacacttaaagaaggcagttatatgataaccacagaaaaaactgcttttgtgtatggaggaaagacagttaataacactaaaattccggttactgttgtttattcggatgataaaggtgaaaactggacaacatgtgagcttgataagatatatactgctgattattattatgtaaaattctttgattctgacaatggtgtgattgtctgcggatatgcaaagagtaatgatactaatgaatcatcaaggatatacagtacaagtaatggtggagaaagctgggatatagttggaagcggaccggctactaatataattaagggtgtcgtgtatgtgtcatcagatgtcggctttttctgttatgattatgttgaaggtatggatagtaatctttataagacagatgatggtggtaaaacatttgcaaaggtaatgcttgaggagcaggaacttgacagttcagctgcaaatccacaggggcaggagactgaaactaaaactgattccgggaaaaatggtgcagattcttcagaacagttaagatggggcgatgtatataaggaagctcttacaccagttgtagattctaccggaattataacaatatatcttacccagggcaaaaatgctgtttataatgatggaaaaacggcggcaaaatatcagtcatctgataaaggaagtacatggaaatatattggccaggttgagataaaagattaaatattaattaaagtgtaaaaaatatttgaataatataaacatgcgtggtattataattatagcaagaggaattataatattacgcatgtttttttgatatatgcattttcttatggacataggacgtgaatgaggattattcataaggagattgtaatatgaaaagcagacatggaaagaaaaagcgcctgacagcagcggttatactattaggtatacttgttattggctgggcggtgatatcatatgcagcagaagacgagtataaggttcatcataatattactattgatcttggtggaggaacatgtgataagatatattatcagtcacagattgataatggggataatgccggacaatggaatgatgatctgagaattggggaatatcttgctgaccgttatggagaataccatactattattgattataaggcatctgtgccgaaagcagatacagtaacatctaattattatgactgcgtaggagttacaccatatgtaagaattggtgcggtaagcagggaaggatatattctgaaaggctgggaagtttcaggagacaaaggatggcatactgattatggaaagaatggcattcgggttgaaataggggcttatacggaagaagatattgttatcaaagcaatatgggaaagacagacatttacagttcattatagcgcaggagttgcagctgacagaggcattaaagcttatcttccggatgatgaggatgcttattatggaagaggggatgaactgataggttttactgagggtgcatctgctgataatggacttatatttaccggatggtcctttgacagatatggtgactctggcatattagaaccggaagatatgagtgattataacaaagatgtgactgtctatgctatatgggattatataattacatttgataataacacagacgcagaggttaccggttatatggagaatattacatcaaagcttggcagcagaatcagacttaaaggaagcagtctgtcaagaaaagggtattatttgtctggctggaatacgaaaagtgatgatacaggaaagttttattcaactatgtctgctgttgacctgacgcctgatgatagcggaaaggctgttttgtatgcgatatggcagccgattttttatgaagtacatctgtattgcaataagccggaagaatcaagtgagatgatgaagattattgataattcagactgggactggtatgaggatgaaggttattacagcagattctatacatatgatgaagaagatgagcttccgtgtgtatcgcagctatatagtcttaccggttggacaggtttaggctgggagacagaagacggcacatatgttgaaggcggcgtgcctggaaagcttaatctggctgataagcttggtgcagttgttgatatgtcagctgtgtggaaagagaatatatacaatattaatattgattctaatggtggatatgatgccggttctacaattatcacaggatatgagaaagagaatgaacttccggatccgccactaagacctggatatgattttgattcatggaacactgaagaagatggaaaagggacaaagtacgaaaataaggatgtagtttcgaagcttgttgaagatgatggcggtaatatgacaatatatgctcaatggaagaagaagaaaaagttgtgtcttaaagtttcttctaattcatatcttaaatcattgattaatcccgcagcagaagctcttgcaaagaactggtttggaaagaataataatacattggtggaaaatatgatgaataagtctgataaagactgtgttcaggtgtggtcagtaagcagagaaggaatctcaagaacgagatgatataacagaagattatagatgacagcctcctgttttgggggctgtttttaaggtatgtatttttatgcaatatatagataaatatttgcttgaaaattacatttaattatggtaacatattgtaaagtttgagagaaaaaaggcatttttgtgtctttttttttgcgcaaaagtcattttagcgcctcttggcatatgattaaattaaataaacgaaaggaattaaggtggcattcatgaaagcatttttgatacttgaagatggaacggtctttgaaggaaccagcataggttcgacccgtgaagttattagtgagattgtctttaacacatctatgacaggatatctggaggtgctgactgatccttcatacgcaggacaggcagtaacaatgacatatcctcttatcggtaattacggagtgtgctataaggatatggaatcccagaaagcatggccagatggatatattgtacgtgagctttccagaatggcaagcaacttcagaaatgaagatcctatccagaaattccttcttgataatgatatcccaggtatttgtgggattgacacaagagcccttactaagatattaagagaaaagggtactatgaacggtatgattacaactaatgagaattataatcttgatgaggtacttcctaagattaaggagtacagtgttaagggcgttgtaagaaaggttacatgttcagaaaagtatgttcttccaggaaaaggacctaaggttgctcttatggactttggcgcaaagaagaatattgcaagatcacttaataacagaggctgtgaagttacagtatatcctgcatatactaaggcagaagagattcttgcaactaatcctgatggaattatgttatctaatggtcctggagatcctaaggaatgtgtagagataattgaagagattaagaaactgtataacagcaatgtaccaatatttgcaatctgtcttggacatcagcttatggcacttgctactggagctgatactcacagacttaagtacggacacagaggtgctaaccatcctgttaaggatttaaagactggcaaatgttatatatcatcacagaaccatggttatgttgtagatgaaagcacattagacagtaaggttgcagtacctgcatttgagaatgttaatgataagactaatgagggacttgaatatgttggtaagaatatattcacagtacagttccatccagaagcctgcgcaggtccacaggatacagcgtacctgtttgacagatttatggatatgatgaagaaggaggactaagaacatgccaaagattgagagtattaagaaagtattagttataggttctggtccaatcgttattggtcaggcagcagaatttgactatgccggaacacaggcatgccgttctcttaaagaggaaggaattgaagtagtattggttaactctaaccctgctactatcatgacagataaagatattgctgatgaggtatatattgagcctcttacagttgaagcattaaagcagattatcttaaaggaaaagccggacagcatcttacctacacttggtggacaggccggacttaaccttgcaatggaaatcgctgagacaggattccttgaggagcataatgtaaagcttatcggtacaactgcacttacaatcaagaaggcagaagaccgtcttatgttcaaggaaactatggaaaagattggtgagccatgtgcgccatcacttgttgttaacaacgttgaggatggcgaagcattcgcagccaagattggatatcctgtagtattacgtcctgcttacacacttggtggtagcggcggcggtatcgctaagaatgtgcaggaattaagagaaatccttgagaatggtttaagactttcaagagtaggtgaagttttagttgagcgttgtatcgctggctggaaggaaattgaatacgaagtaatgcgtgacagcaatggaacatgtattactatctgtaatatggagaatatcgaccctgttggtgttcatacaggtgatagtattgtagtagctccttcacagacactttcagataaggaataccagatgttaagaacatctgcattaagaattattgatgaattaggcatcacaggtggatgtaatgtacagtatgcacttcatccagacagttttgagtactgtgtaatcgaggttaaccctcgtgtaagccgttcatcagcattagcttctaaggcaacaggttatcctattgctaaggttgcagctaagattgcacttggttacacacttgatgagattaagaatgcagttacaggaaagacatatgcaagcttcgagccagcacttgattactgtgtagttaagattccaagacttccatttgataaattcatctcagctaagagaacacttacaacacagatgaaggctacaggtgaggttatgagtatttctgataacttcgagggtggtcttatgaaggctatacgttctcttgaacagcatgttgacagtcttatgtcatatgactttacaggacttacagatgaagagcttcttgaagaacttgcaattgtagacgacagaagaatctggaagatagctgaaggtttaagaagacacatttctgcagccaagatgcatgatattactaagatagacttatggtttattgataagctccagattattgttgatatggagaacgctcttaagagaggacctcttacagagagccttttaagagaagctaagagaattgaattccctgacaatgttatcggcgatttaacaggtcacacagaaagagaaatcaaggaattaagagaccagtataatattcatgctgcatttaagatggttgatacatgtgcagcagagtttgcagctacaacaccatactattattcagtatatggcagtgagaatgaagctgtagagactaaggataagaagaaggttcttgtacttggttctggtccaatcagaatcggacagggtatcgagttcgacttctgttcagttcattgtacatgggcattcaagaaagagggctttgagacaattattataaataataacccagagacagtttctactgactttgatattgctgataagctttactttgagccacttacagcagaggatgttgaatcaatcgtggattttgagaaaccggatggtgcagttgtacagtttggtggacagacagctatcaagcttacagaagcacttatgaagatgggggttcctattcttggaactaaggcagaagatgttgatgccgctgaggatagagaacttttcgatgagattcttgagcagacacagattccaagagctaagggacagactgtattcacagttgatgaagctcttaaggcagccaatgagcttggatatcctgtacttgtaagaccttcatatgtacttggtggacagggtatgcagatcgctgtatctgatgaagatgtagttgaattcatgaatatcatcaacagaattaagcaggatcacccaatccttgttgataagtaccttatgggtaaggaaattgaagtcgatgctgtatgcgatggtcaggatattcttattcctggtatcatggagcatattgagagagctggtatccattcaggagacagtatttcagtatatccagctaagtctatatcacctaagattgtagatatgattgaagattatacaggaagacttgcaagagcacttcatgtaaagggtatgattaacatccagtttattgtatataacgaccaggtatatgtaattgaggttaaccctcgttcaagccgtacagtaccatatatcagtaaggttacaggtattcctattgttaagcttgcgacacaggttattatcggtaagacaattaaggaattaggatatgagccgggacttcagaaggcagcagattattatgcaattaagatgcctgtattctcatttgagaagatcagaggagctgacatcagcctcggaccagagatgaagtctacaggtgagtgtcttggtatatctaagagctttgatgaggcactttataaggcgttcgagggagctggaatcagacttccaaagcataagcagattatcatgactcttgcagataaggataagcaggatggtattgatattgcacagagatttgaagcacttggctacaagatttatgcttcaagaggaactgcaaaggttctcaaggaaaatggagtacatgcaatccaggttaataagattggacaggaagcacctacacttcttgaccttatcttagagcataagattgaccttgtaattgatacaccagagaatggaattgagagagccaaggacggattccttatcagaagatatgctattgagacaggcgttcactgccttacaagtcttgatacagcccatgcacttatatcaagtcttgagcatgcattcaataatcaggaattatctatagttgatattgctaagattgataatcgtggtaataactaatctgataataattaaataatgtaatgaaaataaggggtatcatatcattttgatatgatatctcttattttttatgggaataatatagcatgttatttgcattagttgcagagttatctgttatcacgctcttactttacaaagatatttcatcaacaggataagtgaatcaaacgggggtattttaataaaaacataggaaaaaggtatggtgtttttattgacagataaaaagaggatgatataattctatctgcgaagttagcagatgctaacctattgacacattaaacaggagatttttgattatgccactaaatcttgcagataaaaacaaaatatatataattcagagaattgttggaaacaaagatatggtacacaggcttcaaagtcttggatttgttgtgggtagtaagataagtgtactatctgaaatcaatggaaattatgtagtagttattaaggatattaaaatagggcttgctaaggagtatgttaagcgtattatagttgcctgatgtaaaggagagaattatgtctaataggaaatatattaaaagcttactccttggaatgagtgtcatgatgactatattgagagcttttcagctatacttgcaggcgtgcagaatgaacgtattagtgcgtaccgtataggtggtgatgaattctgcgttattctggagaagacaaatgcagtagagatacaccagattctggatagtcttgaaagaaaaataaatgtttacaatgaaaaaaacaatattaagatttcatatgccaaaggatatgaaataagcacaagagagcattattatcttatggaagagcttactaagcgtgcagacagccgcatgtatgaaaacaagcggttaatgaagggaaaaagattggatggcagaaggttaaacgtatgataacaggaattgtagtagcattattattagcagtaatagtgtttcagtatatgattataaaaatagacaaggataaaagacatgaggccggacatgataagcttactggattatgcaatcctgagcatcttatgcagaaaatgaaagaactgccagataagaaaaagaacagacttatcatttattcagatatagcagaattcaagcttattaatgaaatatttggaatagaaaaaggtaatgaaatattgcttaagcaggcagatataataaaaaaacatgcggtagatggatatttatacggaagagttggtgaagatcatttcgtagtgattgcagatgaagctacatttaatgaagaacatctttatgaatgcagggagacattacagaatgtgctttctgattcagtatataatgtcagagtctgttttgggatatacaggactgataatatgaatgaatcattatcatttatgtgtgacaaggcttcatttgcagtagcctcgattaaggatgatacacatagctttattgcttattatgatgacacaatgcttgaagctgctattaaatataagacaatagttgatgaatttgatgatgctataaaagccagtgagttcaagatgtatcttcagccacagatctctgcaaaaacaaggaggcttacaggtgcagaagctttagtaagaagaataaagccagatggaacgattgtttcaccaatagactttatacctgtatatgagaagtctgggctcataagcagacttgacagatatatctgggagcaggcagcggctaagttaggagagtggaagaaagttggtatcaatatgagcatatcggtaaatatatctcctaaggatttttattatattgatatatttaacacatttgcaggtcttgtaaagaaatatgatatagaaccatctaatctaaaaattgaaatcacggaaactacgattatgtcagatgtacctaatctgatgggagagctggaagaactaagaaaagcaggattcactattgaaatggatgattttggaagcggttattcatcgcttaatacattaaaggatattaatgttgatgtattaaaggttgatatgggctttataaaagagactaagaatgttaagaaaagccgcataatacttgcttctgtgataaaaatggcaaaggagcttaatcttttgattattacagagggggttgaaacagaagagcaggttgataatctgacaaaactgggatgtgatgtatttcaggggtattatttttctaaagctattgatgttaacgagtttgaaaagagatatctatataggaaaaaagctgggtgaatataattataaaacatatattattctggaattacacagataaagtaaagtcataacataaagagaaagacagataggagcatatatatggatttacaaaacatacaagaccaattaaatactgagtttgccaaggacagcacgaagtatatcatgcgtcacagatataagagataagaatgagattggaggtgaaatcgtgaaaactcataaatattgggcagtgggtgcattagcatgtatggttgctacattttataccggcgtcagaggaaagatgaaggaacataagatttttgccattggagcaattggatgtatgttattttctgtactctctgggtataagatgatttcggtcaaaggtgcagttaagaaaagtgaagaagtagaaaaaattagaatatttatgcaatttggtaacatatgttacggaatatggtttgcctaaatactataatacatacataagataaataaaacagaatctgaaaggagatttttattatgaagaaatatgtatgtggaccatgtggttatgtgtacgatccagaggtaggagatccagatggaggaattgcacctggaacaccatttgaagatattccagatgattgggtatgtccaatctgtggattgggtaaagatgtttttgaagaactaagcgaataagaagactggtttattcgatatagagtaaagcctcagcatcaagaattttgattgatttccttgaagacagatgaataaatccgtcctcctgaagtgataaaagcgtccttgaaagggaaggtctggttgtattcagatagagagccagttcttctctattcatggataatgatacaagattgttgttatctgcatgctctaataggtatgtggcaatgcgctgtttgagattaccgctggtaaggacttcaagctgttggttattttcatcagttcttttggcaaagagttccagcatattaaaaactactttgctgtgatgagagcagtttttttcacacctgccaccaaagaagtcctttgcaatctcaagaagctttacatcagtttttgcttttgcatatccgctatagcggtctttattaagaaaaagttcaacttcgccaaaatcttccccttcggaaatgttggtaatacgaagaactttaccattaacattgatggagccaagttctacttcaccattgagaatgaggtagagcttattgggaacatcaccctgaaagaatatataatcgtttttcttatattcatgaatgacggactgagtacaaacgagacttttcttaaattcagcgtcatccagattatggaaaatagacaggtctttgatttgcatataagtaccagctttctattatagtaacatttattttaacatatatgaggtggattgtaaggaggtttttatgacagtaattacatttgatgataatttaataacaggcaataagacaatagacgagcagcataatgagctgattgatcgtattcagcagtttgtgagtgcatgtgaatcagaagatgcaagagtaaaggcaattaaaatgcttgattatcttgatgaatatacagaatttcatttcaaagaagaagaaaaactgcagaaagacgttgattacccaggcttggaggaacatataaagaagcatgaggagttcaggcatactgttaaggaactctatgattatctggatgaaaatgagggaccagatgaaaagtttatggagcaggtaaaaatcaatgttattgactggctgtttggtcatatcaagacatttgacagatctgtagctgaatatataaatatatatgataatcctgaaagattatagaactgtttgttacgcaattatattttaataaagtatgccccagtcagacaaaataactggctggggcaatcaatattctttaacttaaaaaagatatttcattattgatgaagattatagtatcaccagcacagaacatagcgagaattaattctatgaatctgtataaactacttacacctactgttttggttatgtattcagagacgaaatttcgtcaggtaatgaatacatatttgaaagaattgtagaataacaaaaggaagggatgattgaatgaataagaaaaaatcaaattcaaaaaaggcagttatgataggctgcggattcgtaggctcagcatctgtatttgcgcttatgcagagtggattattcactgaaattgccttgatagatgcggataagaataaggcagagggagaggctatggatatcagtcatggaataccatttgccagccctatgaaaatatatgctggtgattatgatgatgtggcagatgctgcaattgtaattatatcagcaggtgcagggcaaaagccaggagaaacaagacttgatctggtaaataagaatgtggcaatatttaagtccattattccggaaattaccaaaagagaatttggaggaatccttctggttgtagcaaatcctgtggatattctgacacaggttgcaatcaaactgtcaggacttccggaggagagagttatcggctcaggaacagttcttgacagtgcaagacttagaagcaagcttggacagcatttatcagtggacagccgaagcgtgcatgcatttatagtaggagagcatggagacagtgaagttgtggcatggtcatctgccaatgtatccggtgttccgcttagtgacatgtgtgagatgagaggacattataaccataaggaaaatacgaaggaaatcgcagatgctgtcaaaaacagtgcctatgagattatcaataagaagcatgcgacatattatggaattgcaatgtcagtaaaacgtatctgtgaagtaattatgcgtgacgaaaaatcaatacttcctgtatcgcacatgatacatggagtatatgagattgatgatgttgtattaagtatgcctgttattgttggtgcagacggaattgaatctgatataccgattaatcttagtggagaagaagcattgaagctaaaagaatcagcagacgcattaaagaatataattgaaacattagagctgtagtaagagtagataatataccagcttatgtgtagattggaggaaacgttatgttagaagtaggaacaaaggcaccggattttgaattaccagatcagaatggagaattgcataaattaagcgaatatcttggaaagaaggtaattatgtatttttatccaaaggataatacatctggatgtacaaagcaggcttgtggtttctcagaaagatatccgcagatttgcgaaaagggagctgttgtactcggggtgagcaaggattctgttgcatcccacaagaagtttgaggaaaaatatggacttgcatttacacttttatctgacactgagcgcaaagtgattgaggcttatgatgtatggaaagaaaagaagaattatggaaaagtgtcaatgggagttgtcagaacaacatatcttattgatgagaatggtatcataataaaggcaaatgacaaagtaaaagctgcagatgatccggaaaaaatgttacaggaattaagctgatgaagataatattatcacctgcaaagaagatgaaagtggatactgacagcatagataccatgagtagtccggtatttttagagaaagcagaagaaattcttgggtggatgcagggaagaacggaagaagaattaaagaaattgtggaaatgcaatgataaaattacgacagagaatattgaacggattaagacaatgaattttcaaaagcagcttactccggcagtattggcatatgaagggattgcttatcaatatatggcaccagctgtatttgaagatgggcattttgattatgtgcaggaacacctgaggatattatcagcattttatggagtattaaaacctatggatggtatcacaccatataggcttgaaatgcaggcaaaggcagcgataggtgatttcacgaatctgtatgatttctggggagataatttgtatcgggaagttatagatgacagcaggattattattaatctggcttcaaaagaatactctaaatgtattgaaaaatatctgacacctgatgacaggtatataactatttcattttgtgagcagtctggtggcaggcttatcacaaaaggcacatatgccaagatggctcgtggtgaaatggtacgatatatggcagaaaatcatattgaaaatccagatgacattaaggaatttgaccatcttggatatgtgttcagagatgatatatcatcggatagagaatatatatttgaaagaaaaactgtaaaataaaaacatggttgattactggataagataattgcgaaggatagaacaggagcaataagggtaagaaaaatttttgaagtataaagttacggaagaaacagaaattgaatacaaagaaaaaatggctgattccacttggaatgtggcttgtatttgaaattgttgcagttacattatggttgaccaaggataatctgttttatcttctgaatttcagttatataggctcggcaatagcgttagggctgttactttttcagttaaactatagacatgccagaagaatcggttttattcgatatatcacctttaccgcatcacttgtttttgtgggagcactgtttttatgccacgtggagaatatcgagcaaattatgttctgggcatttcttgttggcaatatcctgtattatgccattggaatcattctggcatttgcgtttcgggataatagggcattctgtaaatatatctgcccaattaccgtattcttaaagcctatgagttattttagcctacttcgtgtgaagtgtgataaggaaagatgtgtttcctgtgtatggaatgcgtcaaagcatgtcctaagaaggcattatagtgactaaaaatatgtatgtacgggagactctataagagctgggtggcatctacccagctcaatcgtatggaattatattgatagttatcggtataatattggctgctcttcattttattgtggctggagatggtatcagagatttatcctgatagtgttcggccacttccgaccaccacgcaacaaccttttctatatttttatcacttgggtcatttttgaatgcatccgcctgataagctataatgggaataatcccattatcaaggcagtcccgaatctgccggtcaagtccctccaacagttcttgatccactttgtccgcaatacggattcttacatgcgaaatccccgacgccgcaaaatccacagccgactgtgtgttatagtatttgcgcccctgatttgtttttgaccaatccacatccattccgtttcccagaagggttttataccctcaaagagaaggtgtttttcttgtaagagagtacaccttctttttgtaatttactcaattcactagatagagcacttcggtctgcattcagataatctgccagcccttgtctatcgtaagggattgtaaatgtgttagagccagcgtgcatagattcgctagacaagtaattaagtatcttgtcacgtaaatttttcttagaaacatgatctattttgttcatcaatcttacattttttcgtgctattatctctaaaaggttatgaatcaatcttgtatggaaactacaagatgaagaacaggttgtaacaatatgatttatattgaaaagcatgacggtgagattttcattagcaataacactgatttgagcaggaacactactgatgcaggcatagctttcgccatagagcattcctgatgatagctctgtaataatattgcgatttccccaaacatcatcatttattatgagagcctgaccagatagaatcatgccgatagtttgtaccttatctccacttcttaacagatattcgccttttgaataatttttaatgctgacagatagacatttaagcattggaagaatttctgcttctgaaattccttgaaacaaaggtgtattctttaaaatgttaatatatttttccatgagatttttcatacttctttttatcttttccttagtatatcacaaaagttgaaaataatacgaaaatgttgcctagacaacagaatgattaatgtaagtttgatatagttccattaagcaacaaaagatgatgaataaagtaatagaaaaggagaagaacatggaaaataagatgttttgttatcaatgtgaacagacagcaggatgcacaggatgtaccggaaatacaggagtatgcggaaagtctgccaatactgcaagattacaggatgagcttacaggagcattaattggacttgctcgtgcaactgagggtaatgagcagcttgtaactgaagagatgaatcaattagttcttgagggattatttacaactattacaaatgtaaactttaatgataaaacattaaagcttttaattgataagatagaagatacaaaaaagaaattagtaccaaattgctttacatgctctgactcatgtggaagaaacaataattttgatatgagtactctctggactactgatgaagatattcgttcattaaaatccttaatactttttggaattcgtggaatggctgcatatgcgtatcatgcaagtgtgcttggatataccgatgaaacaatcagcaaattcttctataaggcactttttgcaatcggaatgaaagattggggaatggataaactacttcctatcgtattagaggttggaaaagttaatttaagatgtatggagcttttagatcaagcaaatactacaacttatggaactcctgtaccaacaacggtacctcttacaattgaaaaaggaccatttattattattacaggtcatgatttaaaagatttacaacttttattagagcagacaaaagataagggaatcaatatctatacacatggtgaaatgcttccagcacatgcatatccagaactcaagaagtactctcatctaaagggaaactttggtacagcatggcagaatcagcagaaagagtttgataatattcctggagcaattctgtatacaacgaactgtcttatgcctgtaaaaccaagctatgcagacagagtatttacaacagaagttgtatcttatccagaaattgtacacataggagaagaaaaggattttacaccagttattgaaaaggcactcgccttaggtggatataccaaagatcagcatatgactggaattaatggtggaatacaggtaacaactggtttctcacatggaactgtattatctgtagcagatcaggtgattgaagcggtaaagaatggagatattaaacatttcttcttggttggtggatgtgatggagccagagtaggaagaaattactatacagagtttgtaaaacagtctcctgcagacagcattattttgacgcttgcatgtggaaaatacagattcaatgatttagatttaggaacaatcggaggacttccaagaatcatggatatgggacagtgtaatgatgcttatagtgcaatcaaggtcgcaatcgctttagcagaagcatttgaatgtgatgtgaatgaacttccgctatcgatggtactttcatggtacgagcagaaggctgtatgtattttacttacgcttctttatcttggaataaagaacattcacataggaccaacattaccagcattcatttcgccaaatgtgctgaatttcctggtagagaattatgggctttctccaattagtacacctgaagaggatataaaaaagttattaaataaataatcatgagggaaccaaacaaaataggtgaaaggtggtaaaatattatgaataaaaaaatgaatttaaactggtcggtggatgaaattactggtaatatgccagatatttcttctatgagaagcaaagaatttcaagtcaaagagactagcaatacagaattgctgaaggattatttaaagagacttggaaatggagaagatttagaaagtgttaaaaaagattttgttcaaaatttttctgatgtagaagcttctgaaatcatgaaggcagagcaggaacttataaaagagggaacacctattacagaggtgcagaaactgtgtgatgtgcatagtgcattgtttcatggcttaactaaagaagaaaaaatagcaaatgctgaaaaggcagtcgaagaatctttaaaaaaagaagaaagatccgaaatgaaaattatgccggatgcgtatgtcagaaaacatgagcttgcaaaagcactcagagaaacaaaggggcatcctctttattcttttacagaagaaaatgagaagtttggtaaagaaatatcagatattagaggtgcactagaaaagggcgaagatgtaagcaaaaaaatatcagattttagacaaatagcaatacactatgcaaaaaagggtgatttgatttatccactccttaaagttcgctatgaaatttcagggccatcggatgttatgtggactgttgatgatgaaatcagagatgaattagcagcaatagataaagaaagcaatcatgacgaagaatggattaatagagtacaggctgttttaacaagagcggatgaaatgatttataaagagaataatatattgttccctatctgcgcagtgaattttacagtcgaagaatggtatggaatctatgaagatgccaaagactatgcattagtgtatggcattgagaatagatgggaagaagcagaaaaatatgtgcaggataaaaagaatcgtcataaggcggctattaatgaaggtgaaatagtaatgggaggtggacatatgagtgtagcacagctggaagctatgcttaatacattgccaatagagattacatttatcgatgataataatataaatcgtttctttaacgaaggagcgaaagtgttcaaacgacctggcatggcaattgacagagaagtattctcttgtcatccgcctaagatagagccaatggttcgttccattatagaaagttttaaaaatcatactagggatagcgttccggtctggatggaaaagcaaggaaaaccatttttagtaacttattatgcagtgagagacaaaaaaggtatttatcttggaactgtagaagtggtacaggatatgcagtttgcaaaagagcactttacaagcatttgaggctaagtatattatcaaaaataatgttattccaatgtatatattgtatgtagagaagactaatatgactaatatgatgtaacgctttccttgaccttatatagattattaggtataatttataagtatattttaaaaaagggaaggttatgaaatgaacgaaaatcgtaattcattcaagggctctatagggttcgtccttgcggcagcgggtagtgctgtaggacttggtaacatatggagatttccttacttggcagctaaagatggaggaggattattcctcgttatttacattgttttagcattaacatttggttttactctactcacaacagaaattgctattggacgaaagacaaagcagagtccgcttacagcttacagcaagttaaagagtaagtggaagccactgggtattattgcgtgtattgtacctattatgatattaccatactatgtaacaatcggtggatgggtacttaagtatcttcttgtttatattacaggtaatggacatgcagcagcacaggacggatacttctcaggatttatcggtcagacagcagagccaatcataatgatgcttgtgtttacaataattgttgcatttattatattccgtggtgttaacagcggtattgaatcatcatcaaagataatcatgccattacttattgtgcttgttcttggtgtatctgtatattcacttacaatttcatatacagacattgatggcacaacaagaacaggtttacagggattaggtgcttatgtaattcctaacatgaaaggaattactgttaagcagttctgtacagttcttatggatgcaatgggacagcttttctacagtttaagtgttgctatgggtattatgattgcatatggttcatatgtaagtgatgatgctaatcttggaaagtcaattaaccagattgagctatttgatacattagttgcatttcttgcaggtgtaatgattattcctgctgtatttgtattcatgggaagagatggaatgacagcatcaggtccaagtcttatgtttgtttcgcttcctaaagtatttgattctatgggatttgcaggaaatgtaattggtgcaatattctttgcaatggtattctttgcagcccttacaagtgcagtttcaattatggaagctattgtttcaagctttatggatgaatttaagttaaacagaaacaaggctacagcaatagaaactgtaatttgtatagctgttgcagttatcgtatgcttaggatataacaagctgctatttgatattaagcttcctaacggagtacatgcacaggtgcttgatattatggattatgtcagcaataatgtacttatgccaatagtttctataggaacatgtatacttattggatggatacttaagccaaagactgttatagatgaagttgagaaaacaggaattaagatgggaagaaaggacctttatacagttatggtaaagtgggttgctccaattcttttattccttcttcttcttaaatcacttggaattcttactataatctgatatgtaagatattacggcagaggttaacaagaggttttgtgtatgattagtaaaaaatgttgtataatcgcaatggttacacttatgtcaattctgacactgactggatgcagcactatgctaaagaatccgatgaaatacattctttctcaggacgaaaccagacaggataattcagataatgaaacaacatcagaatctgcagatgataacaaagatgacagtaacagtgagcctgatatacgtgtgtatggaacagaagataatacagattattccattgatggaatgctggcaatagctaaagacattaattcagatatgaataataaagatgttaaaggagttgttcttgttctcaataagaaatactcagaagatgtcagatattttctgtcgcttacagttaaggatgataaacctcttgtgataataccatatgattataacaacggcagtccggattataaggtaacacaggctaaggagtatattaataaagactttgataagacagatagtgccaataatcagttaccagaaggattttttgttaatgttaatgattatatgatatttgacattgcggacactaagagattagacaatatagatattgtatatgattatgttggaattgatgcagatgcattatacaagaatatgtatcttaatgatgctatagttatagtttgttcaactgccgatggagagctttcggaagaactttcagaagctgtatcaggaaagaatgctggtattgtagtagtatcatgtagtgaagatgtatatataaagggtgattttgcagactgtggagataatatcttctatacagatatgtcgcctactaaagcgagaattatgctggtattattgttagataataatagtgatttggacacatttaaaaatgcttttaccaggaggagagtttaatggattcaattaaagcacaggacattataagacacatttttaaggatgaagacaagggtgttgcgtatgtaaccggactttcaattacagacggagtagaagttcttactaaagttcttccagagcttatcaagaaagctcaggaaaagaataatgtcaatgatgaaggatattttaatgaaatagctgatgtgtacagaaggattattgttgataagcttcttaatgctgaccacttatggacaatatattgtgacagtacaggttatccatatatggttgatgatgatatagttgtattatatgattatactaatcatgccagagtagaagaacagcttggaaaatatggatatgaaatttcatatggtattgaggataaggattcaatgcagtatgagatagcacatttatatcgtaatggatgcagaaatatcagatttacagatggcagggataatgagcttattgtttcaagagaagagattggagcatatgaccagtatataagagaagattttgtgactaatccaggacttcagaatgcacttatcaagttcttccaggagtacagaaagccaggagattcaacagctaaggcggcaattttaagagataaagaagcagaacttaagaaagctatacgtaatgcagattacatggtaccttgtactaaggaagagacagatgaagaggtatcaatttcacatccatatgttgatattactgataaagtaagccacaaagaaggtgagaaagttcttgcacttccagtatttacagatggtttagagatggaaaaatgttatgcaggtaagcatgaggatatgctttacacatatatggaacttcttaagacagtaaaggaattgggtgcttcagggatagttattaatcctttaggagtaagttattacgttccggttgatataatgaagcagcttataacaatgtaataaaagaataaaatgtatattttaaagacacactggtatcgtaataactggtgtgtctttctgaaattcgggaaggaggatgtgatggaaagagtatatattgcaattgatctaaaatcattctatgcaagtgttgagtgtgttgaacgagagtcagacccgcttaccactaatctcgttgtagctgatgaatctagaacagccaaaacaatatgtcttgcagttactccttctcttaagaaatatggactttccggacgaagcaggctttttgaggtagagcagaaggcaaaagaaattgaggaacgcacaggaaagaggcttgaatatactgtagcagttccaagaatgggactttatatagaatattcgtcgaagatatattctatatatcttaaatatttcagcaaggatgacataactgtatacagtattgatgaagtatttattgatgcaacagattatatgaagctgtataatatgacggcaagacagcttaccgcaaaagttattgaggatgtgtatgatacgacaggaataacggctactgcaggaattgcacctaatctgtatctgtgcaagatagcaatggatatagttgcaaagcatatacaggcagacagcaagggtgtgcgtatcgcagaattaagtgttaatgattacagaaaaatgttatggggtcatacacctcttactgacttctggagggttggaccaggaatatcaagacagcttgaaaaacatgggataaagactatgggggatattgcgagaatgtctcttgaagatgaggactggctgtataagcagtttggtgtagatgcagagattctaatagaccacgcatggggatatgaaccgtgtacaattgcagatattaagaaatataagcccaaggcgagcagcctgtgttcaggacaggtgttaaaagagccatatacatttgaagacgcaagaatagtagttggagagatggcagatgagcttgcattggatttagttgataaaggttttgtgactgattcgattgcgttaaatgtaacttatgacagggtaaatgttgataaaggaacttacaagggtgaaatccatgtagacagatatgggagagaagttccacagggacttaacaaatctgtttcacttacgacatgtacatcttcatcaaaacagttaagagaagcttttcttgatatatatgataaatacactgacagaaagctgtatatcagaaagttaaatcttacagttgccaatcttactaatgagggttttcagcagtttgacatgtttacagaccagactcagcttgaacgcgaaaagaagatgcagcacgcaatgcttgatattaagaaaaaatatggtaagaatgcggtaatgaaagctaataacctgcagagcaaggcaaccgcaattgaaagaaacggtcagattggaggtcacagggcatagcttatgggaaaatatgatgatataatcaatatgaaatggccggtaccgagtaaaagaccaagaatggatatgcagaacagagctaagatattcctgcctttctcagcattgaagggtcttggcaatgccattgacgagcagaataaaaccaaagataatatgagagaatacgaatattttgacgagggaaataagggagaagaattttatgagtaatacaatgaaagaaaataaaatgggtacaatgcctgttaataaactgcttattaatatggctctgccaatgatgatatcaatgcttgtacaggcactgtataatattgttgacagtatatttgttgcaagaataagtgaggaagcgcttacagcggtttcaatggcatttccaatgcagaatcttatgataggtgttgcaggcggcgtgggtgtaggtactaatgcactgctttcaagggcattaggagaaggaaagcatgaagaagctgataaaatggctgtgcagggtatattcataacagcctgcagctatataatatttcttgttataggacttttctttgccagagagttttttgttattcagggggctaatgaagtgatagctgactatggttatgattatctttcggttattcttataatcagttttggctgtctgttccagatgatatttgagagattattacaggctacaggaagaacattttacagcatgattacacagggtacaggtgctataattaatattattcttgacccgatacttatatttggtctgcttggtgcaccaaggcttggtatagtaggtgcagcagcagccacggttgcaggacagattgttgcagcgattatggcagtgatatttaatattaaggttaataaagagatacatattacttttaagggattcagaccatcaggaaaaagaattggcaatatcttattcataggaattccatcagttattatgatggcgattggttctgctatgacattctgtatgaataagattctggttgtattcacatcaacagcggttgctgtattcggtgtgtattttaaacttcagagttttgcatttatgccgatatttggtatgaacagtggaatggttcctataattgcttttaattatggggcaaagagagaagacagagttatacagacacttaagcttgcagtaatgtatgcagagataataatgatactttttatgattgcagttcagatattcccggttccaatgctgtcaatatttagtgcatcgccagatatgatacgaatgggagttcctgctttaaggacgatatcaataagttttatatttgcaggaatatgtattatatgcagttcattctttcaggcacttggaagcagtatatacagcatgtttgtatcatttgtcagacagataatattccttgtgccatgtgcttatattttttccagaacagggaatgttaatcttgtatggtgggcatggccgattgcggagcttgcttcagttgcattaagtgtgttcttctttgtgagagtcaagaagaaaaagtttggctttatggaacagtaatgagtaatacgataaataatgaaggatgaggaatgagtatgaacagacatatagagaaagctaaggaactgcgttcaccgcagaaatgctataattgtgccgaaactattatgatggcatatgctgatgatttgggattaagtgagacacaggcagagtgccttggctgtaattttggcggcggtatgaaatgtggaggaacatgcggtgcaatcaccgggggacttatggtactcggcgcacttggtgtaagtagtccgggtgctgtcggagcatttcagagaacaataagggacaatcacaatggaatgactaactgtgctgaccttttaagagacaatgctttaaagggtggtgagaagaaggctcattgtgacagtatgattatggaatcaataaggcttattgatgagttgacaggtaaagataagtaaaaatgcaatttgtttattgataatatttatcaataagatatagtgaattatatagtgaaatgtgataaagtaagcagggttagggcattctaacctgcgcttactttttttgtgcctgttaatgataaattttcacctattgacacaaaattaataagtgctaatataatgaatatatgaacgattgttcatataatgatatgagagggcgtgcccgaaggaggtaaatatgtttttagagattaatggaatcaaaaagcattatggagaaggcgaaagccgggtggaagtactgaatggtatagacatagaggttaataagggggaaatagttgtactgcttggtccatcaggttctggtaaatcaacactgcttaatattatcggtggtattgatgatgcagacgagggttacatatctatagatggtgagaaaacagcggatatgaatgagaagcgtcttacacagtacagaagaaagcatcttggatatgtttttcagatgtataatcttatacctaaccttactgtaagggaaaatattgaggttggtgcttacttaagtgataaggcacttgatactgacgagatacttaacacacttggactttcagaccatgctgacaagaagcctaaccagttatcaggtggtcagcagcagagaacttcaataggaagagcacttattaagaatcctgatatcctgttgtgtgatgaacctacaggagcgcttgattacaacacatctaaggatatattaaagcttattgaagatgttaataagaagtacggtaatactataataatagttacacataatgatgctatcaagaatatggcagacagagttattacattaagagatggcagaatccgtaagaactatgttaatgataacaagataccggcagcagaccttgaatggtaggaggaaatgattatgagaaatcctttaaataagcgtctgccaagagaattaaagcatgattttggtaaatatcttgtgatattcctgtttatggttatgatgatttcgttagtcagcggattccttgttgcagacaacagcgttaagcactcatatgatgagggctttgaaaaatataatcttgaagatggacattttgcattagataaagagcttgacagctcacttattaatgatattgaggataagactgacagcaaactttatgacttgagatattttgaggaagatgaggctgacagcggtgcaacaatcagagtatataaagacagaacagaggttaatcttgagtgcgttatggaaggtgagatgcctgcctctgataatgaaatagcacttgaccgtatgtatgcacagaatgcgaagattaaggttggagacacaattaagctcgtaggaaaagaattgaaggttacgggctttgttgcagttcctgattacagctgcctttttgagaataattcagacatgatgtttgattcaactaatttttctattgcagttatgactgataagggctttgaaaaagtttcaagtaatcatgtgaaatataattatgcttggaagtataacaaggaagtttcaggtgataaggcagaaaaagaggcttcagacgattatctggaaaatcttggagaagttatcagggaatatgacactaatcttttgatgaatggtaatacggatattataaatatttctgattatcttccacgctatactaacaaagcagttaatttcactggtgacgatatgggttcagataaggcaacgattatgctttttgactatatcgtagtagttgtaattgcatttgtattcgctgttacaacatctaacacaatcagtcaggaggctggtgttatcggaactctccgcgcatcaggctataagagaggtgagattgtaagacattacatggtccttcctgttgctgtaacactggttgctgctgttgctggtaatatacttggttacactcttctggagaagttttttgtaaatgtgtattataacagctacagtctgtgtacttacacgacactgcttaatgcagaagcatttgttgatacaacggtagttccgattatcattatgtttgtcattaatcttttagttcttgagaagaaattaagactttcaccgcttaaattcttaaggcatgagcttacaaacgggaagaagaaaaagctgattaagcttagccacaagcttccttttatgacaagattcagattgaggatattgttccagaatatacctaattatctgacactgtttttaggaatactgattgccggggcacttgttgtattcagtatcatgttcgagccgcttattaatgattatgctgatgttgttaagaagtcacagatatgtgaataccagtatgttttaaagagtcaggtggaaactgatatatcaggtgccgaaaaatactgtgtgacttcacttaatacaactgatgaaaaatatatgactgatgatatcatggtatacggcattgaggataacagcagatatgttgatatggatattaaggatgatgaagtgcttgtatctaatggagtaatggtgaaattcggtcttaaaaagggtgatacatttaaactgaaagacccttattcagataatgagtatgaattcaggatagcaggaagctatacatatgacgctgcacttgctgtattcatgacaagaaataactttattgatacattcgataaggatgacgattactttacaggatatttcacagacaagaagctgacagatattgatgataaatatgttgcttcaatagttacatatgaagaccttatcaaagtgtctaaccagatgaaggtttcaatgggcgagatgatgtatatactgaagtattttggaattataatgttcgtgcttcttatgtatctgttatctaaacagattattgaaaagaatgcacagtcaatttctatgactaagattcttggcttcaagaatggagagattggcggactgtatatagttgcaacttcaattatggtagttatatcactggttgtttctgtacctatagtaaatgctatgcttaaatgggcattctcatcatatctttacactatgatgacaggatatattccatacatggtaagaagaagctgctttgttgagatggttattcttggaattgtatgctatgcagttgttgctgtacttcagcttgtgaagatttctaagattcctaagacggatgcactgaagaacgtagagtaagggttttatggtgtattgcacttcagacacgctcccgctcgtggaagtgcgcagcggtactaagttcactgctcccttcgggagtgcgttcactaagtgccgacgcacttccaacggtctgaagctgcaacacaccataaaacaggcctgcctgggcgtgggctcaagcttgtttccctttgggaaacatcgcttccttgttgaccggaaggttttgttgtgagatgggctcgttcacctttggggaacatcgcatttttgatgtgatacctataggtagtcgtattatcggcggatttataggtagaaataaggaaaaatcatgtattattttgataattattctgtaaacacctataagacagttcataggactcgtcttataggtgttttttgctggaaattattggaatgagtgaaaaagtacctatatgtgcttatgaaaaatgatatttataggaacggtaattccacatgaataaatctatacgaaaataaaaatcacataaaagaatccacgtgaaaataaaagcagcataaaccaagacgtaaccaggagatacagagacggttacatgaaaatgcaaatcgagctatattgaaaggaaaatagaggattacaagcaaaatcaaaccggtttcacaacgataagcaggaatctacatagaaatcaggttgacatcacaagaatatacatatataattaccactggtaattatcaggaataattaacagaggtaattaatgaaatgattgcctcttatggctatataacttaaggagatgaatgtgttatgaaaccagacaagattaagagaatgctggatgcctgttatctggctaagaggatcagagaactgctgccggaactgccagatggggttgcgcctgcttatatccagtatattgatgtaattcatcatctgttggagactaatgattgtgttaaggtttcggatattagtgactggcttaatctgccaagaccgggtgttacacgtactgttaaggagatggaagctaagggatatcttaagaagactacttcacaggaagatgcgaggataacttatattacggttacggataagggagaagagttgtctaagaagtatgatgcggattattacagccgccttagtgaatatctgacggacattactgatgaagaggctgattctatgattgcaactattaacaaattctacaaggtgatgagcgaaaggagagttgatattgaataattcaaaatcagattttacacagggaagtatattagggaagctgattccttttatgatgcctatacttggggcgttaatactacaggcggcatatggtgcagttgatttgctggttgttggaagattcggaactactgaaggtctttcagccgtatctacaggaagccaggtgcttaatttagttacatttgttataacacagtttgcaatgggtgttacagtgcttattgcaagatatattggtgagaagaaaccggaacagataggtgctttaattggtggcgcaattgttgtttttgcaatgatttcggttgctctttttatcgttatgattgttttttcaagacaggttgcagttataatgcaggcaccgaaagaagcagtaggtcttacatctttatatgtaaaaatatgtggctcgggaatattttttatagttgcatataatcttctttcagcagtattcaggggacttggagacagcaaatcaccacttatattcgttgcagttgcatgtgttattaatattgtgggtgaccttgtccttgttgcagggtttaatatggatgctgccggagctgctattgcgacagttgcagcacaggcggtaagtgttgtatttgcgcttctattactttttaagagaaaacttccgtttaagataactaagaaggatttctcaattaacagacattgcaggagagcgttaaaagttgggcttcctcttgcattacaggaatttcttacacagatttcattccttgccttatgtgcattcgttaacagactgggattacaggcttcgtcaggatatggcgttgcatgtaaaatagttaatttcgcaatgcttattccaagctctcttatgcagtcaatggcgtcatttgtttcacagaatgtcggcgcaggcaacgaaaagagagcaaagaagacgatgtttgtcggtattggagtcggactggttataggatgcatagtattcttattcgtgatgtttaagggtgaccttctcacagcaatatttacaaccgatgaggcagttattcagaatggttatgactaccttaagggatttgcgttagagacaattgttacagcaattttattcagcatgattggttactttaatggacatgacaagacggtatgggtaatgattcaggggcttgtacagacgctgcttgtccgtctgccatttgcgtattatatgagtatacagcctgatgcgagccttactaagattggtcttgctgctccggttgcaactatttttggaattgtgttaaatgtggtattctatatctggtgtaacagaaaagataaggcaaaacacaataattaatgataaaaaatatcaataaatatgttttgtgatatgaaatattgacgtggaaatataaaaataatatactcataacagtgttatataacgctgttatagataggaggcgtgagtgtctaaggcggttgaaggtgttactgagaagatagaagaatgtgccagaaaagaatttaagagcaaaggctatgttgaggcttcgttaagaactattgctatggaagcgggaactacaactggttcaatatattcacgatatggcggaaaagaaggccttttttcagcattggttgagccggcagcaagggaatttacggaaatctttgaagatgtccagaagaaattccatgcgatggatagtgacatgcagacagaaagccttgatgaatattcaagaaatgggatgatacagcttgttgagtatatgtataaccattttgaggagtttaatcttctggtgaattgttcttacggtacgaagtttcagaattttgttgaacatctagttgatattgagacagattatacatacaaatatatggaagcggtcggacttaagttcaaggagggcagacctttgacaaaggatttcatgcatattatgaataccgcactttttgagagttttttcgaggtagtaagacacaatatgtctaaggaagaggcaatggagtatattgatctgcttgaaaagtatcacagtgcaggctggagcgtaatatacgatgaatgtaaataataatatatggctgtcagttatggcagcctttatttaaaggtacaggttagcgatatcttactctgaatagtgttatataacgaagcagtaaagcaaggaggataattatggcaaagaaagaggaaaagccagatacaattaagcagttgtttggatatgccggtaattacaggtatctgacaattgcgtcatgggtacttgctacgataagtgctttcgttgcacttgtaccattttattttatatggagattaattaaagaggtgcttcgtgttgcacctgattatggcaatgcgcagaacctgtctgtatatggctggagtgccgttgcatttgcaataggagcaatgcttatatacataggtgcattgatgtgttcgcatctgtcagcattcaggattcaggccaatatgcgctctaagcttatgaggcatatacttacacttccgcttggattcatggacgaagagggaagcggtaaggtaagaaagattgtcaatgaatcaagtgctgcgacagaaacctatattgcacaccagcttcctgacaaatgtgttgcaacagccacaccagtcgggcttgtgcttcttcttttagtgtttgactggcgacttggacttctgtgccttattccggttgtaatcgcatttgcagtaatgagctgcatgatgggcgacaacatgaaaaagaaaatggcagagtatcagaatgcattggaggaaatgtcgagcgaggcggttgagtatgtgagaggaattcctgttgtcaagacatttggacagtcagtattctcgttcaagagattcagggattccatcaagaaatatgagaagtggactgtatcttacacaaaggatttaagaatcccgatgatgggttatactgcagccattaatgcagtatttgcaatacttattgcgggaacattccttttcggcggagttaagagcggcacggtaaacaacacatttttactgaatctgatgttttatataattattacgcctattattacagtcacacttacaaagatgatgtatgcaggcgagaatacaatggttgttgaggacgcactttcgcgaattaacagtattatagaaagaaagccgttagagcagaccgctgataagaagcaccctgcagatacatctatcacatttgaaaatgtttcattcagatatccgggtgcggtaaatgatgcactgcatgatgtcagtcttaagataaatgcgggtgagcaggtcgcatttgtcggaccttccggtggtggaaagacaacgcttgcaaggcttatcgcaagatttgcagatgtcacagagggcaatatattaatcggcggtgtaaatgttaagaacattgatgagaaagagcttatggatacagtatctttcgtatttcaggacagccacctgcttaagatgtctatactggataatgtccgtatgggtaataaaaatgctacaagacaggaggttatggaagcgttaaagaatgcacagtgcgatgatattatcgagaagcttccggacggaatagacactgtaatcggttctaaaggaacttacctgtcaggcggtgaagcccagagaattgctattgcaagggcaatgttaaagaattctcctatacttatacttgatgaagcaactgcatttgctgaccctgataacgaggcaaaggttcaggcagcatttgaaaggctttcacagggaaagacagttattatgattgcccacagattgtcgtcagttactggtgttgaccgtgtatatgtattaaagaatggtcagattaaccagagtggaaagcataatgaactggcagagtcaggcggattgtatgcacatatgtgggaggaatataataaatcagtaaactggaaagtgggtgtgtaatatgaaagaaaagcttatgcataaatatgccctttcaagtcagggcgctaaggatatgattaaggcattcatatcagttacaatatctgatttgatactgatgatacctgtgtctttattgtattttcttgttaaagattatatggaagggaatctggcaggaagaggcggattctatattgccggagttattattacacttgtattgattgcggtatcaacatatatccagtataatgcaacatttttatcaacatatgtagagagtggtgtaagacgaattacactggctgagaagttaagaaagattccgctttcattctttggaaagaaggatttgtctgaccttacaagtactatcatggctgactgcgcacagatggagactgcatcatcacattttataccggagcttgtcggagcgtgcatatctacagcatttgtagcaataggactattcttctttgactggagaatggcaatagcagcactgtgggtacttccgatatcattcattatagtcagctgctctggaaaggttcagagaaagcttaacgaaaagcaggtggcactgaaaatgacgtgtgcagacggtattcaggagtgccttgaaagtgtcagagatatttgggcatataatactcaggaagaatatatgaagggacttgatgagaaaattaaggcagttgagaagcacgctgtatctacagaacttggaactgctgtgtttgttggaagtgcacagatgattctcaagcttggtattgcaacagttgctttggcaggcggagcattattagccagtggaaagttagatgttatcacatttttcatgtttcttatggttgtatcaagaatatatgatccaatgcaggtatcattacagaatcttgcggcaattatcgcatcagatgtacagagtgcaagattagatgaaatactttcacatgatgtgcaggaaggctcagagaagcttgataacaagggttatgacatagagttttctaatgtaggattctcatatgatacaggtgatgaggtattaaaggacgtatcttttgttgcaaagcaaggcgaggtaacagctcttatcggtccgtcgggcggaggaaagacaacagtttcacgacttgcagcccgtttctgggacgctgataagggaaagataacagtcggtggaatggacatatcaatgattgacccagagacactaatgtcgctttactctatagtatttcaggatgttacactgtttaataatacagttatcgagaacatcaggataggaaaaatggatgcaacggacgaagaagttatcgcagcagcaaaacttgcgcattgtgatgaatttgctgaaaaattatcagacggctggaacacaatgattggtgagaatggctgtgagctttcaggtggtgaaagacagagaatatccatagcaagagcgttcttaaaagatgcaccagtaatacttcttgacgaggcaacagcttccttagatgttgataatgaaacaatgatacaggaatcattatcacagcttataaagaataagacagtaatgataatagctcatagaatgagaacagtagcagacgccgacaaaatagtagtattaaaaaatggtaaagtagcagaaagcggtaaaccatcagaacttatggcaaaatccggaatatacgcagggatggtaaacacacagcttacagctgctaactggagtctgtaactatacatttatcagataacttacacttgatatatgcacgttgacagattgtcacgaaatataatgtatgttataataactgacattaacataaaggagaatttctgcgaaagaaataaggtcagattatgttgacatactcgtttgaaaacattggaaaagaatcaatatatgaatatttatacaaatgtatcaagaaggatataatagaaggcagactggttaaggatgagcatcttccttcaaagagaacgcttgctgtcaatcttggaataagcaccataacagtagagaattcatatggacagcttatgagtgaaggatatatatattctgttcctaaaaagggctattatgtatcggatatttcaggtgttgcaaggataaagcctgtaaaatatgaagttcccgaaataaccgcaaagaagactggatataaatcggatttatcatcaaacaggacagatcctggaagctttccatttgcaacatgggctaagcttatgagacgtgttataacagacaggcaggatgatcttatgaagatatctccgggagaaggaacatgggagttaagaaaagcaattgctatgcatctggcttcatttcgtgatatgcaggtaacacccggacagataatcattggcgccggaactgaatatatgtatagtcttcttatacagcttttgggaagagataaagtgtattgtgttgaagatccgggatattctaagattgccaggatatatgcaagtaataatgtgaaattctgctatgccggtatggataatgaaggaatgaaaccggaagcggtaagagaatgtatggcagatattgttcatataagtcctacacatcattatccgacaggtataacaatgccggtaagccggcgctttgaattgcttgcatgggctaatgaaaagccggacagatatataatagaagatgattatgattcagaattccgtatgacaggaaagacaattccgactatgaaaagcatagatataagcgaaaaggttatatatatgaatacattttcaagaacactgacaccgacaatccgaatcagttatatggttctgccaccacaccttgccgcaacatatcaggaaaaacttgatttttatgcatgtactgtatctaatttcgagcagtatgcacttgctgcattcatagaagaaggatattttgagaaacatttaaacagaatgagactgtattatacgaaacagagagaggctgttctttcagtacttaaagaggaaccgttcaaatgtgttggaagagtaagagaggctgattcaggactgcattttattcttgaacttaatacattactttctgataatgaggtaaaaagaaaacttgaggcagaaggcatccatataaatgcgttatctgagtactatcataataatactgatgaatacagccacagctttgttatcagctattctgatatgaagatagaaaacttcagaattgcatgcagtaaaatgtcagaacttacacctttatgatgattatttatgattgattgtgaatgaatataacagttgcaaagaatgtaataaagcggtaaaatctgtttatgtgatttgtaaataatgtgagaggatattgacaaaagtatggtagactacagcatttttccgcttgatgaagagattaaagacaagcttgcaaagctggaaataagttatgcatttcaacctatattttatccgaatggcaggaatatatatgcatatgaggctttaatgagacctaagaatattggggtcatggatttaattgaagagttcaggataaagaatgatttgcatacacttgaggtcgcaactatatttggagcagtacagtgttatgcaaagcgaggataccattcatatatagcaattaattcatttcctgcggaatcatttactgcagaggagcaggctgtttttgatgaattctatgccgatgttctgggagataaggggataatagagattctggaatacacagcactggacattgacaaatggcagtctaagaagaattcaattaacagaagcagattcaatattgcacttgatgattttggaacaggcaataataatatgatggcagtggatatatttgcaccgcatatcgtaaagctggacagaagtctgataacagatattgagaatgatgttgataagcaggagtattacttttattatagagacagcttccataaaagaggcatcaaagtgcttgctgagggtattgaatcaagagaagagtatgaattcttaagggataatggtattgatttagtgcagggattttatcttggacgaccggaataagatgaatgccagtttatattttttttataaatgctttatacaatatatattaacatatcacaaagtatgttgtattatgatggagtaaagaaaacattttttctccctcatatttttttaaaaagagcgatggcagagttaatttgccgtcgctcttttttgcgcggacagcgatgagaatatacaagaagaagtgacagccatgcttgcatgggctgggatttgttcttgtatattcgaggagcgtcgcgacaatgccagaacgcagttctggcatatgagctgaccgcgcggacagcgatgagaatgtacaagaagtgacagccgggaaatgttaaaaaatataagttgacaactcctcctacaggcgtataatatatttatacatctgtaggaggagtttttatgattttatatcatggttctaatcacataatagataaaccattatatggagcaggaaagaaatataatgattatggtattggattttactgtacagagaatatagagcttgcaaaagaatggtctgtatcagacaatctggacggatatgttaatatatacgacatggatactgatggattgagtatactggacattaacggtcagaattatacaataatccattggcttaatatattaattaataacaggatatttgacagttcaactccccttgaacgggaagctaaaaggtatattacacaggagtttcatgttgatactgataatgcagatattattaagggatacagggcagatgacagttatttttcttatgccaaagattttataagcggaataatatcgtatgaacagttatgtaaagcattaatgcttggtaatcttggagaacagatatgccttaagagcaagaaagcatttgaatcaatcagatttacaggttatcagaaggttgattataatgaatggtatcctaagaaaatggtaagagatatgtatgcaagaaatggttataaggcaatggaaaaagagaattatagaaaaggtgaattatatattactaagattatagatgaggagttgaaagctgatgatttgtgcatatgacaaggtctatcttaatatggcccagagagtaatgggaaatatgcttaattatgcagtttatgactgcggatatgaattgtctgaatattataatatatttcttgaatcaagttattgtgaacgttttgggaagggagatatatttgttatagccggtatgtcaggtgcagagctggctataaaagttttggatattccagatgataaaataattatgcctggagtatatgatggcagaagccaggaatactggactggctggatattagcatattatcagtggtatacaggaaagtctttcaggataattcagaaagaagttactattgaaagaataagagatatgtataatccttatcatgaaatggatatatcccagtcagttgacaggattatagagttaagccagcagacacgaatggaaacatatcttaagaaataccggaagatggcaggactaacacagagccagttatcagaagaaacaggaatacctataaagacgatacaacaatatgaacagggaagaaaggatattaataaggcacaggcagaatatgtgataaaacttgcacaagttttatgttgtaatcctgtggatttattagaaatcagaaagtgaattgaaaattagatatggaaattatttccatatcagtgatataataattaatattttcagtatttcaggttcagtgatatctaaggcaatgagactggaataatatataacacagaatagggagaaaattatgggaaagaaaattgccagaattataggcaggatgttactggtggtacttgttactatagtaatgctggtaggaactttattcattatgattaagagaatatgcagcgattcagcacctgctgccagaaatctttttatatcaacagttcttgaatcaggtcagatgaagtttcttgcttcgtggttctgtacagatgcgcagattaatgaagtaattaatgctaataagatggagtcaatggattcagatattgatacatctcttattaatatatcaacagatacacagacggttgacaataacggagaagcagagcagtttgacgggaatggaataagaatggttgagatttcaggaaggtcattctttggaaaaatgctgattataaaagatccgtcacaggttaaggtcggaactacatacccatggggagattacggtaaggaacttcatgagattgtaagcggagcaggggctgttgctggagttaatggcggactgtatgtgtcatcaggaaacagaggcggttcaccgcttggaattgtggtgcaggacggtaagattacatataacagcccttcatcactttccggtctttacttaattggacttaataaggataatcttttagttgttaaagatatagatggtatgtcggcagcagattttgaaagctacgttaatgaagcaggaatcagggatgctgtagcttttcaggaggaaagctctgactctaataatcattttgttccgcttattattaacaatgaagcaagagtattgaaaggtcagggaagcggggctaatccaagaacagcaatcggacagagagctgacggtgcaattcttcttttagttactgacggaagaggtgcttcaggacatcttggtgcaactgcgtcagatctgatatcagttatgcaggaatatggagcagttaatgcagccaaccttgatggcggaagttcttcaacaatggtttataacggcggatatgagatgactagcgtaacattttattatcagaattcatcatggaagctgccaacagcatttgttgtaatgcctaagtaattggaaggagaactgtatagatatgaaaaataatgctaagaaatctataaagataggcagaatcaatataccattgaattactggacagggcttgctgtatatgcagtgattcttcttattcttgcaatctgtatgattgtatatacgggttcatgccttaagaaatatgagaattcacagtcagacaaggttatgaatgatttccttaatgactttacaaaaatggctgctgataagacattagccgataatattgagcttccagccagcagtgagtttgagggaaaagacacatttgtcaatatatacatgtctgaattagatggtacaactgactatacatgtaagaaatcagagggcagctataatacagaagaacctatgtatgacatatatgctgatgataagaaagttgcaagaatgacactggaggccaaagaccagcatgttgttcttggaatacttacagtgtttgactggaagattaagtcaattgagcctgtattttcagcaaagactaatgattatactgtttcaattcctgaaggatatacatttacagttaatggaataactgtgtcagatgattacaagactggcaaagttacagagaatcctgattttgtgaatgtttctaaatatgtcacaatgccaaagtcagttgaatataagcttactggatttgtcaataagccggaaatcaaagtatataatgcatcaggcagtgaagttactgcaaatgtagatgctaagggcaatgtatcattatccgcatgcggtgaaacgtctgatatgccatctgaaagaaaagaagaagctcttaatatggctaaggtatgggataatttcctcactaatgatttaagcggttcaggtcatgggcttgcaacagtgcagcaatatcttatagaagattcctactactggaatcttgcgaaagattatgcttcaagtgcagatattacatttataagtgaccacacattgtcggaaaatccgtatacaggagtgaaagttgataattatattgaatataatgaagactgttattcgtgtcatattgcatttacaaagaatatgacgcttacctcaggcggtgcgagaaaagatgttattgattcgacattctatttcgtgaaatatgatggaagatgggcaattgcggatatgattgcgactacgaagtaatttataggggcggttttacatgaaatacagaataggaatttgcgatgatgagatatctgcatgctctgaattagagctgtatataacagattatttcaaggaacagacggatagtgttgaggttttagtgtggaattcggcagaagaatttataaaagatgtgcctgaaaaggtaaatgtcgatatactgtttcttgacatacagttaccacgcaagaatggtgtagatgtcggacattatataagagagactgcaaataacgcagccatgcagattatatacatatcctcccaaacatcatatgcaatggagctttttgaactccatccttataattttcttgtaaagccgcttaacagggaaaaggtgtgtggcgaaatacagaagcttctgcaattagataatcaggacagaagatttttcgcttatacatataataagaatcaatacaaaatattgcttggagatattatttattataaatgtgagaagcaccacatcaaggttatatgcttagatggtgaaaaggaatatgtcgggaaattaaaaacagagatagagaagcttccgaacaattttgttatgataagccagtctaatataattaatataagacatattaaagagtgtatggggacagatgttgtaatgtgcaatggagacagacttcctatcagcaggaattacagaagcacatttaaccagagaatgttagaaaacagcaaatggggagaattaaagaatgaatttaattaatatgatagtatcagtggttatagaacttgcaagagttctgattacattttcatattttaaaatatttcttaatacaggtaaaaagataactcacatgtggtcatgtgttttatctttttttattacaacaatatgctatgttatgtttaacataagtattgtgaatgttgtatcaacaattgccgggattctgattatatcaatggtatttgagggaaaagtaaaaagtaagatattattaagcgttttatgctgctcaattatgattacaacagattttgctgtatattttaaatatcctgataatggagatagtgtatataacatagtggtatcttttttatcaatattatttttctatattgtagtaatgcttttaaaacttatattcagaaagaagctgaaaacagaattcatgggacagtggtatatattactggtggtttctgttatgagtgtatgccttttaatcggattatatagtgaaagaactctttctgacgatggaacaatatatcttagtgttatgcttttggcattaaatcttttactgtatgtattttattcaaatatgcttgacaggtttgtatattacaaagaaaatgaacagttaaagcagcagatgaatttttatgagcagcagttaaagacaaatgtagaaaatgaccagaaaataagagcaataagacacgacatgaaacatcatataagagaaataaattctcttgctgaaagtggaagaattgatgatatcaaagcatatacagagggactggctgctgacataagacagtctgaaagtgtgtataacactggtaatatagcatttgacggaatacttaactactataatagtatatttgaacagaattcaatacaggcagaaatagatgttgtgataccggaaaatcttggaatagcagcatatgatttgaatataatactgggaaatctttttgataatgctattgagaatgtagtaaggtctgataagccaaaaattgttgcagatataaagtatgtgggacatgttttatacatttccatagctaatacatatgatggaaacattaagaaggataatgatgtcatcataagcagaaaagatggtaatcatggttatggattggataatgtaaaaagaattgtatgtaaatataacggagatattaagatagaacataatgcagaattgtttattataggagttgtattatatgcgtgattggacgctttttatgcgtggtacgaattaacagatgggtaaaatgttattattaatgctggataaatatattggattgggggactttatatgagaaaagcattaataattatagggataggattattgattacatcgatatccggctgtggtgcaaaaagcaatgaaacaggcacagaaagtgagtcatcagttgtagaaatgcagacatcagtagatgttacgaatacatacacagatgttttccgacagaaagaggataccaatgattatctgaaaaactatacaggaagcattaatgcaggcgttaagatagttaataaaccagagggaaatacatacatttataattctgaaccaattgcagttacggttaaaggaaacgcaagttttgatacaactttgggatatctgatatttattaatggtattccgcagaaatactacacagataaagaaagcagtaaagaatatattcatttagagccggcaaacgaaggcagcgactctgaaatgactttgtatatagtgccggataaaggtcaggctggagagaaactggaacttacaataacagaggttataggtgctgcgtacagaccattaggcgcacacgatcctatgcagccagggtgtgatgtaagagttcttggtaaatatacaatcgatatgaaggcagcagcccagtcagataatacaggaatatcagataaggatataaaggaattagaaaaagtaaattatacagattatgaactcagccagttgataaagacatattctgatggttcaatagaaaatcagcttgaaaccgttaatttcagaaatacatatacacagagtgtaattgagaatggaaagctgcatttgtttactgaatttggcggtgcgggaaaaggtgaatacataattaatgtgtatcttaatggcaaattgttaagaatatacaggactaccatagagaactatttaaacagggcggttattgatgattatgttgaatttgattctgatatgttaagcagatacagcgttgaagagtacaatacaatctgttatgctgcagttccttcagcccagagtgcaggagatgttttgtctgtagacggcatagctgctttatgggagaactgaatatatgaagagtgtatataaaaaattgttctgtctgatgtctgtatttatcatgacatttttaatggctgcatgtggcaaagctggagaaaatgcagatgtgtcacataataatatttcagcagattcagaagctaatggtaagtcaatatccggatatgaaagaaaaaggtatattgcagcaggaaatttcagctatgcggttacaacttcaggagatattttacaggcaggtaatagtgaaaatgtatcatcatattcaggtacaaccattatgccggaggttaattcgtggaagaatattaagtatatagacgcagatgttttttcggtatgtgcgattgataatgacggcagagtgtacggtgatggtatggagaatgacgcaggggaagtaacattgtctatgtataaaaatatacagcaggttgttacggatatgcaggtatttactgtacttaatgattctgataggctgatatgtgtgggaagtaatgcaccatcatggtctaagacttatgggcttatatcagggattgcatacatagatgtgtcaaacagccacactgcagtgttaaagaaggacgggaaagtaagcgttttttgtgaaggtatcaatgaagatatgaatacatcacaatggacagatattattgatattgcatgtggttataatttcacagccggacttaagagtgacggaacggttgttactgtaggagataatgattgtggacaatgtgatgtcagcgaatggaaggatatagtccagataacagcatattataagacactcattggacttaaatctgatggaacagttgttgctgcgggagataacagcaaaggccagtgtgatatatcagattggaataatattgtgtccgtagtagaaggaaacgggtatacattgggaattaaaagagatggtactgccgcagctgctggtgataataaatacggacagtgtaatgtagagaattggaagaatatacagcagccatgatatgggggtgaaaatatggcaacactcgatttacaggggatacagtgtgcttatggaaaaaatgtcgtattagatgatgtaaatatatcattaaataatggcgtgacggcactgcttggacttaatggagcaggaaaaacaacactgataaagactataatgcgactgattaaaccgaagaatggaaaaatagtatttaacggtgaagacatatataaaatgaaaagcagatattatgattatgttggatatatgccgcaaatgccggcgttatacgataattttaaagcatatgatttctgcatatatatggcagcacttaaaggaataagtaaaaaagaagcgaaagagaagacagatattctgcttgaaaaggtaatgctgaaagatgcagcagacaggaaaatccgtacattttcaggcggaatgaagcagagactgggaatagcacaggctcttttaaataacccgcagcttataattcttgatgaaccgacagcggggttagaccctaatgagagaattaagttcagaaatataataacagagcttggaacagaaagaatcgttatacttgcaactcatattatatctgatatagagagcattgctaagaacataattctggtaaggaacggaaaagtaagtttgtgtgataatcctaagaaattcatagataatgtatacgataaggtatatgtaataaaagtacataactatgctgatattgcagatataacacaacattttaaagtgtctaatatcagggaaactgatgatggatttgaagtaagagttgttggtgataatcttgaaaatgaattgaataattatgatatatcggtagccacaccggaacttgaagacgcatttttaatgtatttttaggaaatttttggggattgtatatgcataatgttggatatgaaataaaaaagataattactaacagattaacgatttacatatttgtcataacatttttaataaatggcttcgttatagccagaaaaccgtcaactataagaaattattatgataataaatcagcatatgatgaaatgtatcagtatcttggcggtgatataacagaagagaaagtttcgtatgtcacagaaaagtacgaagaactgtatgcaaaaagtatgtcccgcacgctttcaacagaatatgatgagatcttaagaacaggatacgaaacaacagaattatcattgtattctgaaatgtataagaagtatgagtacattttgaattacagcgataatattgagaatgtaaggaacacaggtgaagaaaatgcagagttttatgatgttacaggtaataaggcactgaaaaactataatcagagtatattaaatacatataatcacagagatattaaagatttcagagagactaagaactggaagtattatctggaatactcgttttctaatctgtgtgtactgattacgattttgtgtgcattaaaaggtatattttctaatgagcgtgaaaccaatatgagcatgatgattatcacatgcaggtatggaaagggcaggtgctttgcttcaaagattgctgcagggcttattatagcctttggaatagcagctgcatttataattgaagattttgtgatatttaatgtcacatttggctataaaggaattatgaatccggtgtattcaatagaagaaatgcagtattgcatatacgatgtaagcattcttggatatattgttattcttaatcttttcagaattgccggagtgcttggaataacatcaatcattcttctggcatctgcgattgcacagactaatcttgtatcgatagttttagggggtgccggtattctgccatttatcatattgaatcagcagaatataccgtttaatattgtgcgtctattgcagattaatcaggatgcagcagcatttaacagtatatttattatgaacagatcggttatttacattaactattgtctggttacagggattttgatgtcagtggtattcatcatgctggcgtacattgtagaagtacattgttccacattaacaggaagggagcgtgtatgagattatgataaatgttttgcgacagacagcttatgaattgataaagttctttaaaataaaaaagggatacatattgataattctttttattatagtaaatgcagcaagtgcattgaataataatgtgaaaagttcaaagtattccgacgaggaagaggtattgttaaagttttattatgaaaaatggggtgatacctatgattccgctaatgatacaatgattaatctgtattacagtatggtgacatcagatgattatgacattgaaacagacatggtgattccagaaaatatacgggaacagattattgatgaaaaagaagttaaagatatgatgactgtgtattattcttcgtataatattgcaaagaataatgaacatactaatttgatggctgattcaagatgctggcattatctttttattgaatataagaatattaatatgtttctatgtattatgacactgattatctcgtcaataatattttctgctgataagggcaaaggcattgaagacattgttaaatgtacaagaaatggtaaaagaaagcttcttccgtctaagattattgcagtcattatcatgataatactgcttgaaatgataagaactgcagcattatttccagttattaatacatatggaatttcgtatttttcagatattcctatccagaatgtaaattatatgcaggagactgcggttaatattggaacaaggcaggctatggcgtttcttatattgtgtgaaattgcaggacttatatatgtaagccttataactggtagtattattatcagtaattatgggaaagcagaaggctttatatgtggaataatagcggcatatgtaccatttttcctgctcaataagaataatggttatacgaaagcagccttaccatcagcatttttagcaccatataatttcttaagtgagattaatatatacaggttacagtatattttaacagcggtaataattattggaattatgtttattatggaggcagtgtatacccatgaaaaaagctgtagttagagtattaatgcttatagcagtgttgattgctgcattgtcagtatgtatatatgtagtaaatcatagtaatgtccatattctagatacagacttcgcatatgatttcaaatcaaagctgacggacagttatgttgaacttgatgattatacagttgcatataacaatgacagaaaatgctatgaaataacagacaaaaaaacaggggcaaaaaggcagttgtttaatgaaatgtctgacagtggacgcatgatagctggttctatgacttcacatggcaataccttatattatggagatatggaaaaattctgcagctacaatatagatactgatacaactacagtgatatatgaacttgcaacaaagccaaaagaggttaaggtgtttgatgttgttgtatattacaggagtgtatcaaggcaggagattgagacaatggcagcagattatgtaatgtataagggcagattgtatattgttactaacagagatgtaagagtatatgatggaaagaaaacagagattatcttaaagggtgagtatgttctagaagattatcatgatggcagaatgagtttagtgaaatataacaataatactggcggggtcgagaaaacttgcgagctggaattgtaaattgaattatatttattaccaaattcgatagaaaaacaacagatggcgacataaaacctacagaatacgacaagtatatttacacttcttgatatatatgatactgtacataaataaatgtgcatgtttattaattcagttaggaataacttgcatatgtaaatgcttgaatggtatactattaattataaaagctgttaacattatttaggagattattatgattcattatgatgaagataatattcaattttttgaaaaaaaatattcgatagaggaaatagtacagttatacaaggcaaatagactattatttgtaagaccaagaacttatggttattcacagatttattatgacaataatactacacaattaataaaagctatagacatggggatgccatttccgccagtatatgcttcagaacaacaaaatggagatatggtaactcttgaaatagatgataagttatatagtcttataagatatgtattgggatatgatactattaatatagatggtgaatattataaaggaatgcgtgattttcaatcaatgcaatataattatcgtgtattatcaagtaaaatcttaagaacaatagtttcttttgagatagttgattacagtactcctaagtatttacatatgtttgctgggaattttttatataattggactgctgcacaagaacatgccatccgaaaagaaatatacaaagaatataatttggaagaattgcgtcaaataggacagtatttatatgaaaatacaattggtaaagggataagacttacagagtatgaaatattacagtcagctgcaatatggggaatttataaccatgcgataaaagttgatacaacaagtaaagctcaggaacaaattttaatggaaagaactatatttacaatgtataaaaattacgagtataataataaatatgtaaatagagccagaatggtattacaaagcggtataattgagcatgttttaaaaaattatcgaattaagataataaattcatcaagtgtgaaaagtaaggccagagcgataataatgggattgagtatgtgtgataatgctaattatacaaagttactagcttgcatggataatgttgaatttataagagatataagatattcagagattacatttcaaaatgtagataaatggctgagatatatgtatagatagatgatgggggatagaaatgattaataaaattaatataaagggattaaaatgctttaacgatgttgagctgacattgaaaaatttaacattgcttgctggaaaaaattcaatgggaaaatcaactgttatacaagcaattttagcacttattcagaatggaaataatccgtttagtggagaatatattaatattggaaaaatttctgaattaaaaaatagatatgtaggaagtacagaaatacaaatatcaattaatgataaattttccaaaataataatagatgactattctaaagtaaaaactaagggtaaaaaggaaaaattaaatataaaatatttatgtgcagacagaataggcgtaagagacacatatagtaaggagttaagcaattctgatgatattggagtgaagtgtgaatatgcatatcaatatttagaaaaacattctgatgataaatgggaagatagtgaatttgtttataatccaaaatcaaaattaacatttggaggacaagttgactattggctaaatgaaatagttggatatactataagagcagaggaaatagatagaacggaattaatacgagtttcttttaatgcaaatggacttgtaaataatataagacctaaaaatgttggaacaggggtcagctatattgcggagattattatagctgcattatcatgtgaagctggagatatagttataattgaaaatccagaaattcatattcacccttcaggacagtcaaagtttgtatcttttttggcttttcttgcgcaaaatggagtacaggttatagttgaaacacatagtgatcatatatataattctgttagaaaatctattcataatgatgaaattgaatgtgataatgttagtatatatttttttgagcaaatatcagatggaacaagcagaccgtttcttattcctattaacgaagatggaaaagcggaacagcagagagaaggattttttgatcaaacgaaaaaagatttggaagaaatattggggtggtaaatggaatttatacttaatgatgaatcattatgtggacagtttgataatatagggatatttttggatagtttaaaggaaaatgttagatgctttgaattaataaataatgtaaaagaaaataaaatatataaaactgaaagattttatgaaaataaagttacatcaattgataagttatgtgatttgaataaatataataataatacagacgaattatttttatatttaatacaattggatagcattatatatgaagatccatattgggataataattttaaacagaatttagctgaacaatatacatgtgataatagaaatgtcagctgtacttgtgttgctgaggcggctgaaaataatattcctttattatcttttagacatgagcagtttttagataaagaattagaagtatttaagggaactaagaaaataaaagtgtattcaatatatacacctcaatatttatcagaaaaattttataaagagttaaagctaagcagattagatttgttaaaaacccaatttaataatactaggatagattgttcaattttaaaaactgattgtggagttgatgaattagaagacaaagaatttgattcattaattggaacactgaataaatttgttaatcatgaatcatgggaaactattgccattgatgatggtctacagtataaaaaataccataataaagataacgataatcctttttggagttataagggtaagactataatgaaatttagatttagtaaagttatgagagtatttggatatcgaaaaggagaacgatttagaattattagatttgaacgtgatcatgatttgagtgataaaggatagtattggcgggctggaagtacagaccaatgaactgcagcagaaattaaagacctcatcggaagaaaaagacgcagaaatagcaaggttaaagaagctgttggaagaacagaataataagtaattacaatttaatatttatagtactaactccaccagagacatataactggtggagttttttacattttgtcagtatatattcacattaatagaaataaaatgcctgcatttttatataaaaatgttacaatgtaattaacttgaaatgggtttcaaaagaatatatgcacaaaaagatgtattcaggggtggaacgtgtaatgctgcatagattttgaaatctacgacccggactggagatgtgcctatggcaagtataagagatgtagctaagattgcaggtgtttcgccggcaacagtatcaagggttatgaatggaacggctaatgttgatgctgataagagacagagagtgtatgaggctattaagcagacaggctttgttcccaatgaagtagcaaggtcactttataagaagtcagcaaagctgattggacttattataccaagtataaccaatctattctttactgagcttgctgattcggttgaaaaggctgctgataaaagcggtttcagggttgtttattacaacacagataacaatcctgataaggagaaaatggctgttggaatgttaaagtccatgaatgcagatggaattataataacgtccaacaatgaggaacttattgatgtaattgataaaagcgggttgtctgttgtcattattgactgtgaacatgattttacatttgaaggagatattgttgctgcaatacgggatgtaagtcctaaggccgatggtatatttgcatgtaatgatatgatgacattatcagtgtataagcagcttacacagaaaggaataagagttccgcaggatatatcaatagtcggttttgatgatgttatgctttcaaagcttgtaacacctgagattaccacgatagcccagcctattgataagatgggaagaatggcggtaaagcttataacaggagaacagatttcgcagaatgcagttgtttataaaccagaactaataaagcgagagacaacgaaataaaggagtggtgattattatgaagaaacagggaattttaaacagcgatatttcaagagttttatcctacatgggacacacagatactattgcgataggtgactgcgggcttccgattccggagggaacagaaagaattgaccttgcacttacatttggtgtgccatcatttattgatgtattaaaatgtgttgttgcagactgcaaggtggaaaagattacgctggcaacagagattaaagaacagaatcaggcagaattagaacagattaatgatatttttaaggatacaggcgtagaagtatgctttgtaccacatgaagaattaaagagacagactaaggattgcaaagcagtgataaggatgggcgagacaactccttatgccaacataattctccagtctggctgtatatttgcatgataagcagggatgtgtcgtgaatgaacattgtgatgaaaggcattgataaagcatttggcagtaacaaggtgcttaagaatgccggatttgagcttaatgacggcgaagttcatgcacttatgggtgagaacggagcaggcaagtcaacactcatgaagattcttacaggcgtatacactaaggatgttggaactgttattgttgatggtaaagaggtgtcgtacaagtctcctaaagaagctgagaatgcaggaattgtatttatctatcaggagctaaatgtaatgtttgacctgacagttgttgagaatcttttcatgggaaaagagataactaagaaatttggtatcatagacaagaaagctatgagagcaaatgcacaggaaataatggacagaatgggagtacatatcctggtagacgcagtgatgtctgaactttctgttggacagcagcagatggttgagatatgtaaagcacttatggtagatgccaaggtcattatcatggatgaaccgacagcagcccttacagagagcgagacagagggcgtcttctattgcggttacaagaaaaggcgcgataccttcaattccgtacagaagtgaagtagaatattaagaaaaatgtgcaggatgccaattaaggggtgtcctgcacttgtcatgtgtgctacaataattattgagaagaattatcaataattatttgggcagattatttagaaaaggaaaacacacatgaagttaaatgaacttaagattggacaatgtgcaagaattacctcagttggtggtgaaggtgcattaagacagcattttcttgatatgggcgtaattcccggggcggaagttacgcttgtaaaactggcacctatgggtgatccaatggaattacagatacatggctatgaactgacacttcgtgttgctgacgcaggagagattactattgatcctatagatgagcgtacaagaaaacacgaaagaccagaccgcatatataagtctgaccatccgggacttggtgagactggtaaataccatgctaagggagatggagaaaagcttcctgaaggaacaaagcttacatttgcactggttggtaaccagaattgtggaaagacaactctgtttaatcagcttaccggttctaaccagcatgtcggaaattttccgggagttacggttgactgcaagagcggtatgattaagggacatgagaatacatcagttacggatttaccgggaatatattctatgtctccgtacagcagtgaggagattgtttcgagaaattttgtgcttaatgagaagccaaaggcgattattaatattgttgatgcaactaatattgagagaaatatgtatcttacaatgcagcttttagagatggatgtgcctatggttcttgcacttaatatgatggatgaggtagtaggcaattcaggttctgttgatattaatggcatggaaaatatgctaggaatcccggttattcctatatctgctgccaagaatgaaggtgttgacgagcttataaggcatgcacttcatattgcagagtatcaggagaagccggaaagaactgattattgcgatgagaatgattttggcggagcggtacacagatgtattcatgctgttattcatcttatagaggatcatgcaaagagagctgatattccggtaagatttgcagcaagtaagattattgagggcgatcctcttatattaaagctgctgcagcttgatgagaatgaaaaagagatgcttgagcatattgtacttcagatggagactgagagaggtctttacagaagtgcggcaattgcagatatgagatttacatttatagagaagatatgcgaagctaatgttgttaagcctaaggcaagtaaagaaagaatacgaagccagaagattgataagattcttactggaaaatatacggcaataccttgctttgtagcaattatgcttgcaatattctttcttacattcaatgtgattggtgcatttttacagaatgttctgcagatgggtattgatgcacttactggcgttgttgacaatgcacttgcagcggcaggcgtgaataaggttattcacagtcttgtaatagatggaatatttgcaggtgtcggctcagtgctttcattcctgccgattattgttacactgttttttttcttatcacttatggaggacagtggttatattgcaagagttgcattttttatggataagctgttaagaaagattggtctgtcaggaagaagtatcgttcctatgctgattggatttggatgtactgttcctgcggttatggcaacaagaacactcccaagtgagagagacaggaagatgacaattcttcttaccccatttatgagctgttcagccaagctgccaatatattcattctttgtaagtgcatttttcccgggaaagggtgcatttataatgggtgcattatatttctttggaattattatgggaattcttgtggcattgctttataaaggaacattattcaagggcgaagctgttccttttgttatggagcttcctaattacagacttccaggcatgaaaaatgttttgcagttattatgggaaaaggctagggatttcctgcagagagcatttacagttatatttgttgcgactgtaattgtctggtttttacaaagcttcaatctgcaccttaatcttgttacagattcaaaggacagcatacttgcacttattgcgggaataatagcccctgtatttgcacctttgggacttggtgactggagaatatgtacatcccttctgtgtggcgttatggcaaaggaaagcgtcgtgtcaacaatgcagatacttttcggaactggcatacaggcagcactttcaacagccggcgcagccgcaatgcttgtattcagtcttctgtatacaccttgtatcgcagcaattgcctcggtaaagcgtgagcttggtggaaagtgggctgttataatggttgtgtggcagtgtctgattgcgtgggggatggcatttgttgtgcatgctgtggtgacgatggtgtgatattggattttttatggtttaaagtctaatctgacggactgacatattacaattggactttcgcttgcctactctgagatataaagtccagccgggttatttaagtatatttgaagaatgaaatacgcatattatatgtatcttttatcacaaggagacatatatatgcgtattattttttatgattcgaaaagttacgacaggcagtcttttgacaaggcgctgagacattttggtgatatatcaattgaatatatggtggaggaccttgatgcaagaacagcggtgtacagtaaaggttatgatgctgtgtgtgcatttgttaattctgttattgatgcacaggtgctgaagattctttatgacaatggaataaggctggtacttatgcggtgtgcaggatacaacaatgttgatgttaatgcggctgacaggcttggtattactgtaatgagagtgccagggtattcgccggaagctgttgcggagcttgccatgggacttgcacttgctgcacagagaaggattcataaagcgtatattaaggtaagagagaataatttcagtctgcaggggcttacaggggtaacgcttcatggaaaaactgcgggaattgttggcacaggtaagattggggctgcaatgtgccgtatatgcaggggctttggaatgaaggttattgcgtatgaccgatatcgcaatgaaagtcttgattttgttgaatatgtggagcttgacaggctgctttctgaaagtgacctcatatctcttcattgtccgcttgatgacacgacataccatctgattgatgaaagaacaatagatatgatgaaaaatggtgttatattagttaatacttcaaggggagcaatagtcaacacggatgcgcttatcaaaggaataagggatatgaagtttcacgccgttggtcttgatgtgtatgaggaagagtctgattttgtatttgaaaatcttgaagatgacatactgcagcattcaataacagcaaggcttctgtcgttcccgaatgttattgtaacttcacatcagggctttcttacagaggaggcacttgatgcaataagcgaaacaacattaaagaatgcgaaagcatttatttcaggtgacattactggtgaaaatgtggtaaaataacttaagattatgctgaaagcaaggagcaacgggttatgaaatacatttttactaatggacatatccttgatggaactaaggatatgaaagttttagatggtcattctgtgcttgttgaagatgataagattacctgtattgtgaagggtagcactgtaccggatgggtttaaggagattaatcttgaaggcagataccttatgccggggcttattaatatgcatgttcatcttgcaggcaatggaaagccacagaaaaagcagagagataatgaaaagactgttaagctgcttatgggaacagcactttcaagggctgtgacatataaggttgtaaaggattttgcaaagacagagcttatgagtggtgttactactataagaactgtcggaggtctggctgattttgatacaagagtaagggatgatatcagaaatggcaaggctgacggaccaagaatacttgcagctaatgaaggaatttctgtaccaggtgggcatatggctggttctgttgcggtagctgctaacaatatagatgaagcacttgttcaggttgatattgcaaagagtcagaatgttgaccttatcaagcttatgattacaggcggtgtgcttgatgccaaggctaagggtgtgccgggtgaacttaagatgcagcctgagatggtaaaggcggtgtgtgataaggcacatgcacttggatataaggttgcggcacatgttgaatcgccagagggcgtaagggttgcacttgaaaatggtgttgattcaatagagcatggagcaaagcctgatgatgagataatacatttatttaaggaaaataatgcatttttatgcacaacattatcgccggcactgccatatgcgctttttgacagaagcgtatctaatgcgtcggaggtcgagcagtacaatggcaatattgtgtttgagggaatcaaggaatgtgccaaagctgcaattgccaacgatattccggttgtacttggtaatgatgtgggatgtccatggattacacagtatgatttctggagagaactatattattttcacaaatatgtcggtgtaagcaatgcatttgcattatatacagcaactcttaacagcgctgtaatggctggcattggggatgtgacaggttcagttgaagccggcaaatgtgctgacctgattgtgactaagaataacccgcttgatgacctcagggcacttcgtaatgtagatttagtcatggcgcgtggcagattgtacaataatccgaagttcaaaacgaaaaatattgtcactaaagaactggataaattttgtgatttatgttaattttattaaagaattttacttaaaggaataagattatgaagataggatttgataacgacaaatatttaaaaatgcagtctgaacatattaaggagagaattgccaaatttgacaataagttatatcttgaatttggcggaaagctgtttgatgattatcatgcatcaagagttctccctggatttaagccggattcaaagcttcagatgcttttacagttaaaggaccaggcagaggttgttattgcaataagtgcagaagatattgcaagcaataagattcgtggtgattatggaattacttatgatcaggaagtattaagacttatagatgcatttacagaatacggactttttgttggaagcgtatgcattaccaagtatttccagcagcctgatgttgataattttattaaggttctggatgcacatggaatcaagaatttcaagcattataagatagcaggctatcctaatgatgttgctaagattgtaagtgatgaaggctacggaaagaatgaatttatcgagacaagcagaccacttgtagttgttactgcaccggggccgggaagtggaaagatggctacatgcctttctcagctttaccatgaatataagcatggagttaaggctggatatgccaagtttgagacattcccaatctggaatattccacttaagcaccctgtaaatctcgcttatgaggcagcgacagcagaccttaatgatgtcaacatgattgatcctttccatcttgaagcatatggaaagacaacagttaattataacagagatattgagatattccctgtacttaatgctatgttcgagcttattgcaggagagagtccatacaagtcaccaacagacatgggagttaatatggcgggtaactgtattgttgatgatgaggcatgccgttatgcttctgatatggagattatcagaagatattacaaatgtttatgcgaccagaagagaactggtgtaaacagtcaggaaatatataagattgagcttttaatgaatcaggcaggaatcacaccatcttcaagacctgttgttaatgctgcacttgaaaagtcagcaaaaagcggtgacaaaccggcggttgcaattgagttggaagatggaactattgttaccggaaaaacaggtgatttgttaggtgctgcgtcatcagcattgcttaatgcattaaagcagcttgctggaatagatgattcagttgacctgttatcacctgagtcaatcagtccaatccagactttaaagactaactatcttggcagcaggaatccaagacttcatactgatgagattcttattgcactctcatcttcagttgtagccaatcctttagctgataaggcattaaagcagattcctaagctttatggctgtgatgttcactcaacagtaatcctttcatctgttgataaagatacatttaagagacttggaatgaaccttacatgtgagcctgcttatgaggaagaaaagagatttcataagaattaagtaatgtattataattttagcgttattcagataaacgacctactaacgaattttatatgagcgcgttagtaggtctttgtatttgttagagaagcatgataggaagccgaagcctgccagattggacgttgaggcggtggaaaggcatgtagaagtccaaaagtcttagctagacatgaatgattggactttgaagttatgcaaagtcagtaataaagcaatctgaagtccaaaatcccgagccagtgcgatagaaagcaaattattcacaagttatttttgtttgtatcatctatatattgaaacttgacaaaacgggggggcggtatattcttaatcagcagagtagtttaaatatctgcttaaattaataagaggggataaaggataatgagaaaacaagttttattaggtatgatgatgtttgcaatgggagcaagtcttattggatgtgggaaaagtgatggcaaaacagataatgctacaactacaattacaagtgaaaatcaagttgtaaatgaatctacggagattaagaaagatgaaacaaaaaatgatacttcggattggattagatatagtattgaccccaaaggaagtgtaagatgtcctaaatattttagttctagaacaagcggtggtggagagtatttatataaaactgattcaaatccatattttattgtaattgatggtggatatgaaaatgaattaaacagcaattcatttgatgatgtatttgataatttattgcatcgtttaggaacttcacgttatgtacaatttggaaaacaagatctattaaaggatgtaaaagttgaatgtgtaaagaaagagacatgtaaagtaaatggacatgacgcatatagatacacagctaaaacaacaggagcagctaataacaaagagtgttatatatatggatatctttctagcacaccaaaatcatcatttacaatttatgggataataacagatgagtcacaattacagtcagacgcattaaagaaagaaattcagacagaagttgatgcaattatgaatacatttgaaacaaaatagttgataagaatatatttaagagacttggaatgaatctatttgaataaaaatagtataagacctactaacgatttgtaatataagcgtgttagtaggtttttgtatttttatagtgatttaaagcattattatttgacgcacgacaaataaaaaggaaagtatgctatgggtaaaaagtcatattagaaaagcaggatttggcatatcttaaatgattgtatatcagaacgaagaaaagtgaggaaaactgtatcttaaaggcgatgtgacgacaaagaaagagaggagtttttgagagtaagctgattaataggtaaaacaatcttatatattgaaacttgacaaaacgggggggggcggtatattcttaatcagcagagcagtttaaatatctgcttaaattaataagaggggataaaggataatgagaaaacaagttttattaggtatgatggtgtttgcaatgggagcaagtcttattggatgtgggaaaagtgaaaatgatgcggaaactaacacaccaactgtagtaagtgaaagtaatgctgttgataaatctacagaggcaaagacagaagctaaggcagatacatctgattggattacatatagtttagatccgaatggaagtgtaaagtatcctaaagattatacatatggaacagatacaggaagatatttgcaaaagaaaggtagcaattactatataataatggatggtggatatgaaacccagaagttaagtgatagttcatatgatgcaacatttgatgacttgatggggagaataggttcgtcacattgggttaaatttgcattaccaaatttgttaaaggatgtaaaagttgaatgcgtaaagaaagagtcatgcaaaataaatgaacatgatgcatatagatacacagctaaaacaacaggagcagctaataacaaagagtgttatatatacggatatctttctagcacaccaagatcatcatttacgatatatggaataataacagatgattctcagtcagacgcattaaagaaagaaatccagacagaagttgatgcaattatgaatacatttgaaacaaaataaaaaggagattatgctatggggaaaaagtcagattagaaaaataatccgttgacacacataattatatttgatattatttatcaagtaacttaatattccatgagggagtagttagcgcgtaagtgtgatttgtcaacattctgattataatagagagtataatctggcaaatcttaaataatgagactcatgtatatcaattattttcagtgtgcaatatcactgaaaataattgatatacatgagtttttttatacccctcggaaaaagaaaaagcagaaaaataaggagatttatatgggtaattttattaataacgcgccatttgcgcttgtaattgtgttcctgattattggatttgtgctgcttattaaaggtgcagactttttcgtagaaggaagctcaagtgtagcaaagagactgcatgttccgtctattattattggacttacaattgttgcaatgggaacatcgcttccagaaacggcggtcagtgtatctgcatcaattacaggcaacaatgagcttgcagtaagtaatgtagtcggttctaatatatttaacctgatggttgttattggcgtgtgtgcaatgattgcaacagtaaatgttgcaaaagaaacaataaaaagagatatcccattttcacttatctgtgcaggacttttattgattttaggaatccttggggttggtgataagtcaggaatgatgcttggacattttgatggtgtaatatttatcggtgcatttgcaggatacattttttacatgattaagattgcactaaaggcaagcaaagaaggcaaaaaaatcgagattgagggcggttctgatgaagatattaagttgatttcagttccgcttagtattctgtttattattggcggtgcggctgcgattgcagtaggcggagatattaccgtagacgctgcctcaaggatagctagtgaccttggaatgagccagacacttataggacttacaattgtttcaataggaacatctcttccggaacttgtaacatcaattgttgcggctagaaagaatgaagttgatatggcacttggtaatgcaattggttcaaatgtatttaacatacttatggtacttggtattgcatcagcaatcagcccaatcagcataattacagaaaatattatagatttgtgtgtgcttattgtatttacaatatgtgtatggatatttgccggaacaaggaagaaaatcggaagaatcgaaggtttttcaatggttgcactttatgtgatatatgcagtttatatcataataagataaatgaggtaacataccaatgttgttgtttttaaaagtattttttactgaattcatagctgagatgggcgataaaacccagctcatgcttattgctcttacttctaaatataagttaagagatattatattaggaactgctgcagcaattcttgtacttaacggacttgctgttttagcaggtgggcttgtcagtgaattcattcctgactggcttataaagactattgcagcacttgcgtttctttattttgctgcatcaaccattgccggggaagaagaagaagaagaaggcagcggcaaatcaaagattaagtttgcaccacttgcagttttctgtacatttttcattgcagagcttggtgataagacacagcttacagccataacatttggtgctaatgaaggtatgagtgcagctcttgttgtatggataggatgttcgctcggactttttgcagctgacattcttggtatgttagttggatatctgttaaagagcaagactccggacggactgcttaatacacttgcattcgcaatattctcgatatttggtgtatttacactttatcagggacttaaacttataagggcatctgtctgtccgattccggtatggccaatactaatagctgcaactgttgtttttgttgttatatgtgtctgtctttttataagaagagagaagaaagaaattaattaaaatgaaagtaatcgtatcattttttatgtgatgcgattattttttttgtaaatgtgtcgatataataattagaaaagtcaaggaagactttatccaataaattttcgttcaaggaggaatgaattatgagtagtgtatattcagggaatttttcccagatagccggttcgtatgcagatacagcggctgtttattctaagtcagagacaactaagaccgatgagacaagcggaaagaagaaagtcagtggtcagactatcggtaatccccagttaagcgagaaagcaagcaaatattatgaacaattaaagaaaaagtactctaatatgaattttattcttgtaagtgaggatcagaaagagaatgccaaggctaatgcggcaggttatgctaattccaataatatggttgtccttattgatgaggataagattgaaagaatggcttctgatgagaattacagaaaacagtatgaaggaattattgcaaatgctgcaagtggaatctcacagcttgcaagcagtctttcagcaacaggaactagtgtaaagggctttggaatgcaggttaatgataatggtacagcatcatattttgctgtgcttgaaaagtcaagtgctgcacagaaggagcgcattgagaaaaaggctgcagaaaagaaagaagctaagaagacagccgagaagaaggcagaaaagaaaaagaatgaggagcggctggaaaagaaacgcaaagaaaccggagatgtcgatgatactgacgatacggagactgtaacagtgacagcttcatcaatagaagaacttcttgaaaagataaaaaatcaggagcagcttttcttaagtgatacagtaagaactccacaggagaagaatgtggggcagaatgttgatttttctgtataatgtcagggggtgtgcctagtgatattatcaggaacaatagcaagtaccgtacaattgcagatgcttaataacaagtggatgcagaaaaaggaatctggcaacgttttatctaagcaggagttaaatgaacgttctacatggacatccgagcagtttatgattgcagattttcaggaccagttagaacacaatcgggaagcagagaagcgccagaaaatagataataagattatgtcaggtgggagtctttcgccggaggaaatatcttatcttgaaaagaatgatcctgttgctttaaagaaatatcgtgaaactaaagaagaaaaagaaagctataaggaaaaactgagacaatgcaagactaaggaagaggttgaccgtgtaaagctgcagaagcttggagaactggagagttcattaagtagtatcgtcaatgacccggcaatacctaaaagtgccaagttagcgaaagcacaggaaatacttgcaaagactaacaacattgaggctgcacatcttgagtttgtcaaatccgcagattatcagagtatgccaactgatgaagaaaagaaagaacaggatgcagcagataatgatatatcagatgagataacagacagtgagaaagctgatgatactgaacttactgacgcttctgataatataccagataaagcagatactgtagatacaaaagtatcagataaaacatctgaaaaagataatcacaagaaagaatacagtacagaaattaagaaagttagccgaaagcttaagaaaggttttgaggcggctgacatgcatgttgatacaattgtataattgtataatgtagtaataacttcgttaaactggaatttagcgaagtgactgaaatgtgtactttactactgtaacgagcaatttttaagtaaaagaagatgatttcaaggattttccagacgaaattaaagacctatttaggcacttatttgagtaactgcaaaacgccgataaatcctgatttatcggcgttattttatctattattatctattatcgaccttttctggatacatatcatggtttgccattctgttgaatgctatctcctcccattttgttccaggttttccataattacagtaaggatctattgatattccacctctaggagtaaattttccccatacctctatgtattttggatccataagttttatcaaatctttcatgataatattcatacagtcttcatgaaaatcaccatgatttctgaaactgaataaatataattttaatgatttactttccaccattttaatgtttggtacatatgatattgtaacagttgcaaaatctggctgccctgttataggacacaaacttgtaaattctgggcaattaaattttacaaaataatcattaccctgatgtttattctcaaaagtctctaacatctccggtgcataatcacttggatactgtgttttctgatttcccaataatgttatatctgctgtttcttctttacttcttccagtcataattttctcctttttattccatagctggatcattaattccgtttaactcaaatgctctggctctatctatacatgttccacactttccacaaggtttttcgttgccttcatagcaactccatgtgtacttataaggtacatttagctcaagccccttttttacaacctgatcctttgttgcattgataaatggtgctacaaccttaatctgctttccacttccaagatatatagcctcatttattgcattattaaaatcactgctgcagtcaggatatgcacttccagccgcatcatccgcatgtgccccataatatatctcactgcagccttttgaaattgctatactggcagcacttgataaaaataacccatttctaaatggaacatatgttgaaacaggagaaccatttgtgctcttaatctgctcatcatatgattctttaggtatttccttatcagaatgtgataataatgaacaatcactatattgaaatatttttgcaaggtcaagataaatatgttctacattatagtattttactattttatctgacgcttctatctcttttgtatgtttctgcccatatgatattgataacgcaataacattttctggaccatatttttctactgccataccaaggcatgttgtactatctattccaccactgaacaaaaccattgctttcattgttaaatctccctcttaatgtttgtgtatatgtttttgtgttagcttttttaattcctcttgcggtcatgcagctatgacatccttcaataaatactgctatatctttggcaccagtaatcatctgcataatatcagcaatatcacttcctattctttcttgaagctgcagtcttttagataccatatctgctattcttgctatcttactaagacctattactcttccatttggaatataagcaactgttaccttcatatcatacataagagcaagatgatgctcacaataactgaaaatatctatatcttttaccactaccatattggaagttccactctgacatttacattctatttgttcagactcttcttcatccatgtccagtgcaaatgttttgttaaacatatccgcaatttcttcatttgtataattcattccatcaaaaacttcttcatacatttttgcaactcttttaggtgtatcttttaagccctcccgttcagggttatcacccagagccttaagaataccagctatatgatattcaattgccttagtgtctattttcttatgtttttccatgtcagactccttttttgtctggtgaccatataattttatgtaactgaatctgcatattaacatcattcattacattctctttcataaaattaacaatttcctcaggttctatcattccaaataccggacttatataaaggttacattttccatacagattatatttttctataatctgttttgcctttataagatcctctcgacaacctgctacaaatttgacagtatcattgctatttaaaatatcaaaattatccagattcatggccgcttccataccactgcatgaaagcttataatccattgtaaaagttacattctctttgtgaagcttacggattttatcaagatagacactgccgttagtctctatttcaatgttcagattgttttctgcaagaactgttataacattttcaataccttctcttagcagtggttcaccaccagtaagagtgacattttttactcctgtcgataaaacataatcaagaatttctttttctgtcattggttgagaatgtgtctcctgctcattagcccatttggtatcgcagtatttacagttaagattacagcccttaaagcgtataaaaaccgctagctgcccggctttagttccttcaccattaatacttacaaatttttcaactacttcatatttactcatatataaatcctttcagattaaaaatcattccatataagttgcactattagcaggagtttcatatacagttacagctctcatgttgtatccaagtatttttattttttcataaaaatacttggccatattctccgctgtcggtcggaaatcaagttcaataattttgaaattctcgctttttaaagcttcaaatgtagtttccttcaatgaatttctttctataattaatgcatgatccattgaatctgctatgtttcttaaatcttttttcagttctccaaaatcaacatacatacccttatgctgaacatcttcctttagttcctcagtttgaacttcaagaacaatcttccatctatgtccatgaagattgctgcattttccattgtatcctgcaagaaaatgtgccgaatcaaaactagcctctgtttttaaaatatacataaatcttttctccatttgcttatattgcattaaaaaaacacggatacatctgtacccgtgccttaatagattatttccctaaaaatttccaattatgaattataaaaataatagtcctggttttatttagagacaggatggtacaaacgaactgtcttattaatttactgtgcaatgatatcaaatcattcacagcttgtcaattaaatactcatggttatcttccctaggaaattttacacttaagttttctcaaattgcctaatgaattactgatttttaaaatcggtgtattccttttttatccatttcattattacatcaacaagataatcctgctgaatctgcgttagctctacaccaggcttcatcttatgccactttcttatgcattccctgcagcaggtagctgttgcatgctgtgcaataaatacagaatgccctttcatcggagtctgtttcccatcattgggtattaccgctggggcttcccttttcattagctttgatgataataccttgctcatcaataagtagtctgatactaaatactctaattaatatttacactataccacataaccccgattctatgatataatatcctaagaaatttctccgaggaggataaagtatggaatacgatgttattattattggagccggaccgggcggaatcttttctgcgttcgagcttatgaagaagtcacctgaaaccagagtggctgtatttgaagaaggcaacacattagagaagagaaaatgtcctatagacggcaagaaggtcaaagcctgtattaaatgcccaacatgtgcgattatgaacggatttggtggtgctggtgcattttcagatggtaaatataatataactaatgatttcggtggaactctttatgagtatatcggcagggatcaggcaatcgacctgatgaagtatgttgatacaatcaatacatcacatggtggtgaagagactcacatgtattcgacagcaggcactaagttcaagactttatgcatgcagaacaagttaaagcttcttgatgcgtcagtaagacatcttggaacagatattaactatattgttcttgagaatatgtacaatgagatgaaggaccatatagacttctattttaatactcctgtaagcaatattgaggtgattgatggcggttacagagtattctataaggacgagtacatggattgtgacaaatgtattgtttccgttggccgaagcggaagcaaatggattgaaaatgtctgtcagaagcttgagattccaacaaagtctaaccgtgtggatatcggtgtgcgagttgagcttcctgcagttatttttgcacatcttacggatgaattgtatgaaagcaagattgtatacagaacagagaaatttgaggatcttgttagaacattctgtatgaatcctaatggaattgtagttaatgagaacactaacggcattgtaacagttaacggacatagctatgaaggtgctgagaagcagacagagaacaccaactttgcacttcttgttgcaaagcatttttcagagccattcaaggacagtaacggatacggtgaaagtattgcaagactttccaacatgcttggcggaggtgttattgtccagagattcggagaccttatgagaggaagaagaagtacagagaagcgaattgaggagggacttgtaaagcctactcttgctgctactccgggtgatttaagtcttgtacttccaaagagaattcttgatggaattattgagatgatttatgcacttgataagattgcaccgggaactgccaatgatgatacacttctgtatggcgttgaggttaagttctacaacatggaagttgagattgacaacaaccttgagacaagatataagggcttatacataattggtgacggaagcggcgttacacattcattatcacacgcttctgccagcggtgtatatgttgcaagaaagattatcgaagaaatgtagtcacataatattaatataagggagattgccataagacagtctccctttaatagtttaattaatatttttattaagctttattatttcagcccctaacagattggcatcatcagttccatgagttgcaataagcaaagtacggttgttacgcatttttaagatatagtttattacatttaatttagtatccttatctaaacctgtaaatggttcatcaagtattattaatttgcccggatatgataatgcttttgcaagtgcaacccgccttttcattccaccggataatgaacttacaggtaaatcaagactatcatctggaagaattgataacagattattacggacttctgccctattgttttttctacgaagcacaattctgacattgtctattgcagaaagatcaggaataagcctgtcctcctgaaacatacaagatatgtttttagtatctattccggatatacagccggaatctgcacgttcaagtcccattagaattcttaaaagagttgtttttcctatacctgaagcacccataaggcaatatatcgaagaatcttcaagtgttatattgacatttttaagaatttcattgtcatcaaagcttttgcataaatccgtgattataatactcacaataattctcctgacattttaaatttattcgatagaaagcaggcttgtaacacagtaaagtgtctgtccgttatatacaactcttgaccagccaacctctgtattatagccggttctggtaaaaagctcgccttttttagcggttgcaacaacaacagaatctgcatctgtcacactaggtttatttctaagattgacctcttccttaggagttacagtatcattacagtctgtgaatttcgtgttaaatccggatgtgggactttcagttgccttaggtgtaaggtctgttgtcaagtaacttgtaacagcgtatacagtctgtccattgtatacaagtcttgaccagccgctgctgcttgttccagtccgtgtaattgtttcaccattgacaagtgttgcaattactgctgcgtctgtatcctgactaggcttgtcacgaagccttacttcatctttggcagtaacggtatcattaacagatgtgaataccatgcctgcttctacatctggagttgcagaagccgcagtttcaccgcttaaagaaccattactttcagaataaccaaaatatgcaacgttaatatcaacatttgtaccaattcctgctaccctgccctgattagtatactgccacatgctgcatgttcctgcatatgatgtggaaggagtctctggataaggtgttgacggatattgtgcaacccatatcttaaatgatttttcaagaatggcagtgttccactgactgttattggtaagttcagaggaagcagcataaaacataggggtatagcctttatcatatatttcctgtaaaaatgcaacagctacggtagttctttcagccttagtcatgctcttctgcctgctttcagatgtgtagaagccttcacagtcaaatgctacaggataagttatactgtagtctgctatgaaatcagcaacccagtctgcttcttcaatagcttcagattcattaactgctgatgagaagaagtatacaccgactttaattccgttggctgcagcctgctgcatgttgtattttgcattggtgtcagcatagataacccctgtcttctgcgctctgtagccgactcttatcattgcaaaatcaacacctgatgaagcagcctgtgcccagtctatagttccctgaaatttagaaacgtctacaccgatagttacatctgatgtttcattagtgctgttggaaagaattacagaagcaccattacctgcatcctgattcattgctccattattgtcggaatactgaggatcctgttctttctcatctttattacttaaagtattattgccatcggcatctgttttgctgacagatgaagtctcttcagttgaagatgcatttgcaggtattttttttcctctatgaccgaaagaaacaataagtacaattattaatgcaattgctgctacagcagctattatgactgcaggcaggaattttttccagttaatatgaatagaatcatcaagatatccaagatcatcgtcatcagaattaaacagcttagacatgttatacatcgcctcctaatttaaataatccctgcacagataattaagaagcagggctgcaccattactatccattgcagtaccatttagtcccatatagttaattgtccagtaactgatggtttcatcatatgtgaattgaatcttcaatgaagaattcatgttattatatactactttaccgttgaattctacaacctttttattatcagcagaactgaaaatagtccattcggggtctgtacatttgttatcaagacattcaccaaatgttatagattcatcctgaaatatctgttgttcttttactgtatctattctggaatcctgcattgcactggctttagtacctatgcctgcacttgtcacaccgataaagcatattattaatgtgagtatgacagcaaggagtgttgaaattgttcctgaaaatgcatcatctaaactgtcatggtacagtatgaatacaagaataccacctgctattccaccgccaagatgaccgaggatatctacatttgcaccattagatataagagcatatacaacaattaacgcaatagatacgattacagtagtcttattagaatcagtttttgaactgaaattagtaaaaagtgttgcgcacattacaccaaatattgcacctgatgcacctgctgcaaagcggattacatcaggattgataaggtgtgatacatatacggatacgagacctgatgcaagtcctgaaccgaaatatataattgcagtacgaagtgaacctatacgcggttcgagcctcgaaccgaacagatacagcgcaaccatattattaataaaatgtggtaaattggcatgcaggaacatataagtaagaagtcttatatactctttgttattgtggatgtactggtaattaagtccacctgtttcaaaatgatcactgcctgctattatgcacataatgcctgcaagcagattggcaaggattataataagcacaacaggcatgtttctaagactgacttctgaatatcgtttcttttgactgtgttgataaaaatcttcaggattaattctgtcagatttaatctcgtatacttcatcatcaagatgaaggtcatcaaatccattgggcttaaactcgctttgatagctgttatgatagttgttattgtaatctggttccatagaatatttctcccctcatgttaattttccactctacaaaaaaagaattcagcattacactaaattctttttcattataacatattgggtcaatatgtgttatttaatatgaagctgtgctttaataataattctttgagaaccatccattttggctttaatacttccgttatgctcggaaacaatagcctttgcaatcgaaagaccaagaccatagccggttatcttagcggatgttgaatcagccctgtagaatctgtcaaacattctgtcagtaagattcttatcaatattatcaacatcattgcttacgattaaaacaatatagcttcctgaagaatataatttaaagtctatgttacctttacctgatgaatatttaaatgcgttatcaagaagaattgtaaatagctgccgtactgatgatgcgtcaccgcagcatgtaaggtcaggtgtaatatcgtaggtaaaatgtttacctgaatcaagtgcaagtgcattataagagcgcacagcttcttctgcaaggtcagaaacaggaaaaaccacacgttttatatgaccgttgcgctcatccattcttgcaagtgatacaagactgttagtcatagctgtaagattttctgcctgtttctttatatcttcaatccattcattatcaggattatccatctgtaatatatcagcatcagctcttattactgtaatcggagtcttaagctcatgacttgcagaggttatgaattctttctgcttgcggtgtgcttttgcaataggcatgacgataagctttgaagtaaatataagaatcaggagcataactgcaatacctacacatgatgattctataagagaaacagctgttttcttaacatcatctatcatattacttcgaagcacgaatacagcaattgtacgtttctctttttcatatatgcaatatctgtaaccattgtaaaatccatcaagttcgccagtttcatatgcttcatgatatattttcatagcctcatattcagaaatatcagatatgttatcgatattaatgtttacggggcgtttttttttattaaatataatatagaaatacctggcatctgctttaactggtttttggtctaaaatattaatatatatagatgaaacaagatggtcggatttagataccatcttattgtatgtgtttctgacacttgtatacacaataaatccttgcataattattacaactgccattgaaagaactataaattgtattcttaagcgggtaagcattttctcattataattagatgctttattgttttttgacattatataccttctttatattagttgtttttttttaaataatatcccatatttcttcttgtagcaatagaataatcagactttaaagcttcaagttttctcctgagataagatatataagtccatacggtgctgatatctgaatcagattcactgccccagattttctccataaaatgttctgccgaaataacctgggttttattattcatgaacatcagcatcatctgatattccttatttgtaagaagaaatgaacctgaaggagaagataattcacatgtagttgtgttcagcgaaatatttccaagtgtaataatattatcctgttgtttttcagagcgtgtaagtacacggattcttgcaagcagttctcttgtgtcaaatggttttgtaagataatcgttagcaccattatcaagcccttctactttatcatcaatctcggtcttggctgtgagcataagaacaggaatgttgctgccacgttttcttagattctttaaagctgtaattccatccattaccggcatcataatatccataattacagcatcatatatatcttcttccagataatcaagggcaatctgaccattttcaacgcagtcaacagaataattattcttctgtaatatagttgatacagcccttgataatgagcggtcatcttcaactagtaatattctcatatataatcctccagtcgaataatattaatcccagtagccaagttctataccctttaagtatatagctttggctttggaataatatccataagagttaaaatgtgtgaaatcagcacgaatctgttcaggaagattgcctgtctgtatatcaattatatcattttcggttggtgtaagtccacagtcagatagtgcattttccataagataaagtcttgtgttaaggaaatgttctccaaatgcatcatacagagcttgttcccataatgttgcatgaagtcccgcataattaccattattatcgtatacatcctgatatatgtcagctgattctcccggattatcagtatcaccaacaattatataatcagcataatagctgttattaattatattctgatattgttttataagttcatcataatcattctcccagccaccattacttcccatctcaagaataagaatatcattgcgatggtcataagctgccttaggaataacccttgtccatgcgttaatatacatttcagttacagaatcacagtctgcatcagaacatatagaaatatataagccttcatcggctctttcgacataacataaaacatcattaatatatactgtgtctggatatgtgttatcttcatatccatatccgctgtagtcatccatatcgattgtttcttcattttcatcaacaaattttacataagctaatgagtggtcggttatatagatatcacggtcagtgtatattggaattccgcccgcacgtaaagaaatctgatatgaactctcaccacctacaccaaagttgtaggtattgattgatgtaaaatattgcagagcagatggagttgtaaagtaagatatgtcttcaataccattatcagagtatatatatgcttcgttacatccagctccctgcatcatactatcaccccagcatgttatgctgcgttcagggatttcatcatctaatactgattcattagtgtaagactcaagaacaatattatcattattagataaaatgcattcgggctgagagctgtttaatgttatcttagattcttttccagaacatcctgttaagaacaggcttaataatatagtacatatatttaataaagcaaaaaggttttttttcatatgaatttctccaatctgatatcttttatctttgttctgacattaatataaaatatcaacctaaaattaatttaaaaaatattcactaatcatcaataaaatggtaaaatattaaaatatgtttagataatggaggcagattattatggattcaacattaagaagaacatgggctgaaatagatatggatgcacttgcacataattatgaaacattacggaaaagaattggagaaaatgttaagtttttaggcgttgtaaaagcggatgcttacggacatggttctgtacaggtaagcagacttttacaggagtccggagcagattatcttgcagtaagcagtatagatgaagctgtagaattaagacacaatggtattacaatgccggttcttatacttggacatacacctaaggaagaagtatctgagcttattaagaataatataacacaggctgtaacatgcagggctaaggcacttgaatacagtgaggaagctgttaaatgtggtggtacattaaagattcatattaaagttgatacaggaatgtcaagacttggatatctgtgtgacggagattattttgaaagtggtgttgaaggaatatgtgaaggctgtactcttccaggtcttgatgctgagggaatattcacacattttgcagtatctgatgaatttggagaagaatatgaaagctatactaagcatcagtttgaattgtttaccagtgtgattgatgaagttgagaaaaaacttggaaagaaattcaagataagacactgtgccaatacaggtgctgttgcaagatatcctgaaacatggcttgacatggtaagaccaggacttctgctctatggctatggagattttgcacaggagcttggacttaatcctgttatgtcacttaagacaacagtaagcacaatcaagacttaccctgccggaacagcaataagctatggaggaatatacaagactgacagaaagacaagaatgggagttgttccttatggatatgctgatggatatttcagatgcctttctaacagatatgagcttatgacagaagaaggtcctgctccacagagaggcaagatatgtatggatatgtgcatgattgatcttacagataaaatgaatgttgacgttggtagtgaagtagagatatttggtaaggctaatcctattgagcatatggcacagcttgcaggaacaattccttatgagcttacatgtgcagtaagtaaacgtgtccctagaatgtacataaaggatggcaaagtttatgaaaaagaattattgttaagaggataaatgaatgaagaaaatattatgtgtattaatgtcctgtttattgtttgtgatggcaggatgtagcgggcatagtaagaatttgaaatttggcgcagcagatataggcggagtgtattattcatttgcaagcacgtttacacagctggcagataaagagattgatggatatacatttgaaacaaagactactgctggttcggttgctaatttaaggcttatatctgatgggtatatagaccttgctattgtccaggcagatctgttaagtgatgcatataatgcaactggtacatttgctgataaaaaataccagaagggttacaaagcggttgcttccctttatacagaatgctgccagattgttgtaaggaaagattctggaatcacaggtattgatgacctgattaataaaactgtaagtgtcggtgcttcggagtcaggaaccgaaaagaatgcagaacagatattaaagatgagtggaattactgatgagcttattaataaggtcaatatggattatacagaagcggctgaaaaacttaaagccggagaaattgatgcatttttctgtacagcaggaacaagaacagaagttattggacagttgtctaaggaatgtgacatatgtcttataagtcttgatgacaaatgcatagacaagatgttatcagcatattcactctgtgaaaaatatactattccggcaggaacttataatggtcaggattctgatgtgacaactattggtgttaagtcagttctgattgcaaagcagtcactttcagacgatgttattaagaaagtgactaagacaatatatgagcatgctgatgattttaagtatgctacatctcttgatatttcatttgatataaatacggcggctgatggagtagatattccgttccattcaggtgcggaagcgtattatgcagagcatggcatcaatgttttgacagaataattaattctgtatatcaggttaatgctataaagaatggagaaatttaatgaaggttcagttagacatgtatcagacgctggctattgcggtacttgtactgcttctaggcagctatttacgaaagaaaattaaattccttgaaaggttctgtataccggcacctgttgtaggaggactgttgtttgctatatttacatgtatatgttatgttactcatatactagagttttcgtttgatgacacacttaaagaagtatgcatggttttctttttcacatccgtaggatttcaggctaatcttaaagtacttaaaaagggcggaaagtctatggtgatatttctgggattagttatagtccttatatttatacagaatggtgttgcagtaggtttatctaaggttatggggcttgattcacttataggaatgtgtacaggctcaatacctatggttggcggacatggtactgcgggtgcatttggaccggtacttgaagattttaatgttaagggggcaacgacaatatgtacggctgcagctacattcggtcttatatttggaagtcttgtaggaggtccattaggcaagagacttattgagaagaaaaaacttttagatacagcaattccagaggatgacagtcttcttattgaagacgaaaagaagcatgaaagacattccagaatgtatgcatcagctgtattccagcttattattgctatcggtataggaactattttttcatgggctcttacgaagacaggactaacatttcctatatatatcggagccatgattgcagctgcgcttatgcgtaacattgcagaatatgcaggaaatggaaagcttgttattcatatgggagaaattaatgaccttggaggcataagtctttcattatttcttggaatggctatgattacacttaagttatggcagcttgcatcactggcacttccacttgtcatacttcttggtgcacagataatgattattgttttatttacatattttattgtatttaatattatgggaagagattatgatgcagcagttcttgttgcaggtacatgtggatttggaatgggagcaacgcctaatgccatggcaaatatgcaggcagtatgtgacaaatatgttccatcagttaaggcgtatctgttaataccacttataggaagtctttttgcagatttcctcaatagtctggttataactttttttatcaatatattataattatagaggagttaaatatgtttaatatattcaaaaaggtaaaaaataaagttgatacatctgaaaaggattatagtctgtcgtatgataatcttgctattcctgagatacataagaaagattcagatagtgaaaaagatgatgcggatatatcatcagatattgtcccggatgataatacagataagccacatgttacatatgacagcctggcagttccagaagtgcattttagaaagaataaataaaaataatgggatgatatcactaaaggtatcatcccattatttattaaccctcaagaacttcttcaatattcttaagaatctcttctttatcaaatggcttggtaataaaacgtttggcaccaagcttaagagcctcaattactttgtgctgctgtcctgcagcagttatcataattactttggcattagagtcataagctttaatttctttaagagcttctgttccgtccatgttaggcattgtaatatcaagtgtaattatatcagggtaatatgtcttataagcaagtacaccctctaatccgtcagttgcttcagctaatacagcgtaaccggcttcttcaagaatatcacgcagaatctttcttgacattccggaatcatcaacgataactactgttcctttgctgtctaatgtaacttctccacctgcttttgccataatctttcttacaacaggcatatctccagctttggtttcatcagaggcagatatgaaaagcagaacttcactgtcatgtatatgaataggaagtacataagcatctcctttggcaaactgattttcataagcaaactgtggagtaatctctaacatgctgcccttcttagaaattgctgttgcaaacaatccgcttatacagttagtaaattcacctatagcatcatatacttctattccaagattagatatattactatgagagaatccattagctatatcaactatagctgtctgttcaccaacacttgcaaaaccaacaataatatcaaggtcaccttctattttctgacctgcaagacatctgtattcaagctgtgaaatatgcttaattctgtctatatagaaatcagatgttacaaatctttcaatattagcaagtgcaagcctgcatatatcagttacatatgactttgatgaaaaggcaaatattggaacaatctgttctaaatcatcattcttaagaccatccatatcctcatcagtaaaaccatgctccttctggaattccttaagaagctcgtcaaccttcgataccgatatatctgctgcttctgaaagaacagaaaggaatattgcataggcacttccctgctttttaagaagagcatctaactgttcttcagtcatataaccctctccaacagcgatttcaccaaatcttgcatcctttgttgtctgtaaatgattaatttcattcgcctgtttgtcagtaataataccatcagctacagcaattacaccaagctttgctcttgattcagcaagtctttccattatagaattgtacttattcttatctataacctctttttcgataagaaatttaccaaataattgacaaaacattacatatcctcctaaacattcacgaaatattaattaaatatattttatcagcattagtcggatatgtaaagaatgtgtcggattttgttgaaaaaaatcaggtgtgtgtcagtaagattattattaaaagaaaatgactgcccgaaaaatacggacagtcatctcctgatgtaaatatattatacctaaaaggaaatatagcagattactgtaaagccttgaatgcttcgtcaagatcttcaatgatatcatcgatattctctgtaccaattgaaagtctgattgtgttaggcttgattccctgatcaagaagctcagcttcgttgcactctgaatgagttgtgcttgcagggtgtattgctaatgacttaacatcggcaacattagcaagaagtgagaataactcaaggttatcaatgaacttctgtgcttcagcagccccacccttgatttcaaatgtaaagattgaaccaccaccgttagggaagtacttcttataaagagcctgctgttcttcgttagtagagattgaggggtggtttaccttctcaactaatggctgattctttaagtactgaacaacctttaatgcgttctctacatgtctctcaactctgagtgataatgtttcaagtccctgaaggaagatgaatgaatgaactggagaaattgtagctcctgtatcacgaaggagaatagctctgatatatgtaacgaatgcagcaggtgctgtatcctttgcaaagcttacaccgtggtatgatacatttggttcaacaagccatgggaacttatcagcagcccctacccagtcaaatttaccactatcaacgattacaccgccaagtgttgtgccatgtccaccgatgaacttagtagctgaatggataacgatatctgcaccatattcaataggtcttacaaggtaaggtgttgcaaatgtgttatcaacaacaagtggaatgttatgtgcatgtgcaatcttagcaattctttcgatatcaacaacttctgaattaggatttccaagtgtctcaatctgaacagccttagtattaggcttgatagctgcttcaatagcgtcataatcaaaaggatctacaaatgtagcttcaattccgtaatctggaagtgtatgtgcaagaaggttatatgttccgccgtagatattcttagctgctacgatgtgatctcctgcatgagcaagtgcctggaaagcatatgctaatgctgctgcaccagaaccaacagcaagtgctgctacaccaccttcaagtgctgcgattctcttttcaaatacatcttctgttggattggtaagacgaccgtagatgttacctgcatccttaagaccaaatctgtcagcagcatgctggctgttatggaatacatatgatgatgtaaggtaaataggtactgctctagcatctgttaccggatcaggctgttcctgtcctacatgaagctgtaatgtttcaaactttaaatttctttcagagtaagatttctttgccataattaattaccatcctttttaatttatttcaaaaatgtattgctttcttgatgttgatgataatataaacccttatccctactatgtcaataggtttgtatgatatttttgaaaatattttggaaatgtgtgttggttctgctttgggatatgtattggaattgattgttagtacctattggggaggtgtattgtatgaatcttgccagaaacctactaaagtctgattagacaataaaatagtgggtttttattgcatgaattaatctttgattattggcagaaacctactagaatggatgttaatacatatttcgtaggttattttgatgaaaaagtgttgcaaatgtgttaataaaacagcttggatagcgaaaaagacctactaagatatataaataaattgtatgagtaggtctttatgctacccgacaggaacaacagctgtaataaagacctacccaattaagaatttatagttggttagtaggtattccaaattattaatgctaactaagttgttatccattatccttgaagtttacctaggcagtttatctgcgtagtttatccacgcagcctcgcaacagcagcttttaatgcatctattgcatagtcagcatcttccttggttaaatccttatctatgcttaatcttaaagcacctttagtttcacctttgcttcgtccgatagcaagaagcacatgtgaagggtcgattgagcctgcagcacatgctgaaccgctggatgcacatataccgttcatatcaagcataataagtaaagaatcacccgaaacatctttaaagcagaaatgcatattagacggaagacgcttcaggctgcacatgggcaaacctaccgaaacagcattgacatcggcattagcatcaatacaaggtccatcaaaagtaacgtcaggaatctcaccaagaatcctgtcaacaatataattacgcatattaataattgtacgtgtatctttatcaagtgtacctaaggcaagctttacagcctgccccatgccgacaatgcctggaacattgcttgttccagcgcgtcttgcacgctcctgtgccccgccatggatgaaaggctctaacttagcggtattcttcatgtacatgaaaccgacgcctttaggaccgtggaacttgtgtgcgcttgcacttaacaggtcaatattcatctctgtgacattaattgggacatgacacatagcctgaactgcatcagtgtgaaaaagaatgccatgcttatgtgcaatctcacctatttctcggacaggctcaattgttccgatttcattattggcaaacataacacttataagaattgttttgtcagtgattgcattctcgacatcttctaatgaaacaaatccttcgctgtcaacatcaaggtaagttatctcgaatccgttcttttcaagatatgcacatgtattaagaattgcatgatgctctatcttagttgttattatgtggtttcctttatctctaagaccgaatgcagtagactttaaagcccagttatcggactcacttccaccgcctgtaaaatatatttcattgcttttagcagcgccaatactgtcagctataatttcccttgcctcttcaattgccatcctgcttttctgggcaaaattatatacagaagaaggattgccgtaatattcagtaaaaaatggaagcattgcagagataacctctggtgaggttgatgtagttgctgcgttatccatatatataagtttatccataatattgtccttattaattaaataatagttccgcctccaagtacattgtctccgtcatataatacaagcgcctgacctggtgttatggcacgaacaggctcgtcaaatgtacattcaagagtattctcatcaaacattcttatggtacacatagaaccttcatggctgtaacggattttgcctttagcacgcatttcaccctcaagtgaaggtattgacatgaaattaaggttgttggcgtaaagcttaggtgagaacacatctgaattatcaccgattacaacctcgttggtttcaggtcgtatagcaacaacaaatgccggttttccaagagcaagtccaagaccctttctctgaccgacagtgtagtgtattataccctgatgttttccgattacattgccattgacgtcaatgaaattaccgggaacagaagtatagcctgtttcgcgcgttataaatcctgcatagtcattatcaggaataaagcatatttccatactgtcaggcttcttggcaactgtaatagcaatcttagatgcaatttcacgaacctgatccttagtataatcaccaataggaagaagtgtatgtgataactgatcttgtgtaagattataaagggcgtaggtctggtctttcctggcagttactgaattgcatatagtgtatctgccattagaaagctggtggattcttgcatagtgtcctgttgcaatgtaatctgcccctatttcaagacttctcttaagaagagattcccactttacataacggttgcaggcgatacatggattaggtgtacggccttttttatattcgtcaacaaaatagtcgattacattacatttgaactcattcttaaaattcattacataatatgggatatcaagctgacctgcaacacgtcttgcatcatcaacagcactgataccgcagcagccgttctcagcggcttctgttgcatcatcctgccatatctgcatagtcacacctattacatcatagccctgttcctttaatagataagcggcaacagaggaatcaacgccccctgacatgccgacaacaacttttttcttcattactaatcctcaatcatttcttatatctcttatttcatctgcaagtgcgcagatttcgttccaatgcttcttagaatcctcatcatatacagcacatatcttaaatccaccttgtcttgcagattcaatgccgtgaagaacatcttcatatacccatgtatcttccggtttaaaatgcattttttcagcgataagcttgtagctttccggattctttttattatacggaatgtcatatactgtaaaaatgttgttaaaacagtcagctattccaagccggttaagtgcagcgtcaacgcagcctctgtcagagcttgtaaatatgcacatgcaagaaccggcttcatgctcacgtctgattaattcaagcattccgtctttagccggaatatctgtgctgtagtgtcttgtcataatatccacagcagtctgtcgcatagttgctgcatcagtgtttatgcctaattcatcacggaaataagcagaacattcatcaaggtccattacataagtacgctcgtcaaagtcatcaggtaacttatcaacatactgcatggcgtattccttggaaacatttctccagtaaggcatagaatcaagaatagttccgtccatgtcaaatatgaaatccctgtgataattaaatacacggccagtctttaagtaaagctctttcgtagcaagtccaggatcatcagcggcaaatatagctgaaacaacagcaatcccgtcaacaccagtgcctgcaagctcaccgcagttgtcgtaatcaataccgccgattgcaacgacagggatattaactgaacctgcaacctcaatcagtcgctcacgaggcatgtatacagcatcctttttggtacttgaaccaaatacagcaccggttccgatataatctgcaccaagtctttccgcttctttagcctgttcaactgtcttggcggtcatgccgataatcttattatctccaagaatacttcttgcagtcatatagtcagtgtcactctgtccgatatgtactccgtcagcgtcagcttcaagtgccgcctgcacatcatcatcaataacaaatggtactccatattttcgtgcaattggcttaattgcttttgcttttgcaacaatttcatcatgcgatgcatttttttctcttaattgtaaaaatgttgctccattttttaatacattttcaacaacatcaatgagactggctccgttaagccagcttgtatctgtgattgcgtatagacgcagttgttcttttctaatcataattaattctcctgaataaaattcaatatgtataataacacatctgcctgtacctttggcatacattttttgacacattttaaaaaattctataaaatattctgaaaatgttgtaacgaaaatccatttcgtgcgtctaacctatgtaagacggaaggaggtgaccagttctgaattacgagaaattgtacaattcctattatatgcaggtgtattcttatgtgtttactatagtaaagaatcagtctcttgctgaagaaatcacacaaaatactttttacaaagctatgactgccaaacgcccgtatgagggcaaggcgggtgagctcacatggctttgcagtattgctaagaatctcgcaattgatgaatgcaggaaaaataagaagttttctgagcttgatgagactttaccgcagcagacggctgatttggcggataaagtttcggatacagattctgctttgcagattcatatggttcttcatgaactaccggagccgtataaagaggtatttcagttgagagtttttggagaactcacatttgcacagattggaattgtatttggaaaaactgagaattgggccagagtaacttatcatagggccagattgaaaataaaagaaaggattgattagatatgagtaataaagaatgtgatatcgtgcaggatttactgccactttattatgacaatgcatgcagcgaagagagccgcagatttgttgaaaagcatctgccaggctgtaatgactgccagaaaatgtataatgaattaaaagaaaataacgttgatgaagtacttgcaaaggaatcgaagggagtactcgaaagacatgcaaaaatagagcgtaatgcagcatacaaggcaggagttgtgattgccgcaatacttctactgccaattgtcattacatttatagtgcagcttgctaccggcatgggattaggtgtattctcggttgttactgcttctatgctgcttgtcgcagcacttacggtagttccgcttatgtccactaataatcgtctgttaaaatgtattcttgcaggagttacttcgctgatgcttatactgttcttcgttgaccgtatgaatggtggaggaaacttcctgttatgggctatacctacagtatttggtatatcaatagtattgttcccgatagtgatatgtctggttaaacttccaccggtacttagtgataagaaggcacttataacaatgacatgggatactttgtggctgtttcttacaatgtttatagtgtattatcattccgggatggcaggaatcagggaaggatatactgttgccattgtacttatgactggcgtgtgggcagtattccttgtaatcagatatcttccggttcatggactgatgagagccggaataagtacgataatttctgtaatatgggttgcttttgctaatgattttcttaagtttattctttataaagataaggcaattgttataagtaatatgaacctgtctgactggagcacagatcttagtattaatggaaacgtattattcattattttattatctggctgtataatcggtgtcgtgcttataggtataggtgcgtttcttatgagaaagaaaaatgtttagaagataagataagcccctcacaaggttgatgctttgtgaggggcttataatttattctgctcatatttaaactctccgcagcagagagataagatttatatttaagatactatacatatatatattctgtcaagctattatctcatgcttttaatatatgccctgtaatttttaacaagcaatggcacttccgcaataagcatgccaatccagccagcaagataagagaaaggaagtgcttctattcccatgcctaatgcaaatacaagtggtatggcggcaagtacacggacacccatattgataaagcttgaaagcagggtaatctttaagtcaccgattcctctgaaatatccctgaataccattagtcaatgcaggcaatatgtacattacagaaataagcttaaggtagattacaccgtgtcttataacctccgtatcagaagtgaacagcttcataagtggtccggcaaatacgaaacatacaaagaatatgaagattccatatattatttcaagaataataccggctttaaagcctttgattactctgtcgtctcttccagcgcctttgttctgtgccatcattgctgtcattccgtgtgcaatattctgctcgggtgtatatgcatagtcatcaattctgtttactactgcaaatgcggctgaaaccgaaacgcccatagtgttaataatagcctgtattcctattttaccaagctgtacagtagcctgctgcatagcagatgcccagccgtagcttatagttttcttaagcagtgagcggtcaaatacaagccacttcttgccaagacacagaatcggtactttgaatttaatatatatcatacagaatacacagcagagagcctcgctcactacagttgcaactgcacatccattgctgccagctttcaggacaacaacaaagaaaaggtcaccaaatacatttaaaactgcacttatgataaggaaatacagtggtgttgcactatctcccaatgcccttaaagtgcttgagaaaaagttataaaggaatgtgaagatgagtcctaacatgattattcttaagtactgggttgtaagtgtcataattgatctgtcaacctgaacaagcataagaataggtcttgtaaatactattgcaatcagtgtaagtgcaagtgagaatatcatacctgatatcatagttgtacttatctggcgggaaagtgtgtccattttcttaccgccgaaataattacccataagaatacttgcacccatacataatccgttaaggaaaagaataatgagtgtagttattggattgcatattccaacagcagccagtgcttcttttccaacaaatcttccgacaataatggagtcaaccgcattataagtaagctgaaatatatttcccagtataagtggaattgtgaatttaattaacataggcataattctgccctgagttaaatcttttgccataattgatgaaacctcttgtgtgaatttcgtaaatgatactgtcctaagtgcatgattttaatgcttattttaaaatatgtcaagaaatatgttatttacaattacaagacgcaaattaagataaaaaattaataacctgtaataacagtacttagtctgcacttacgttcatgatcaagagatgtctcttgtctgtgaccagggaatattttgtaatcgccaattaaagtgttcatcattttttctattgatgaaataagtaatttctcatttccaccaggtaaagaagtttttccatgtttttcaaacataatggtgtcaccagagaaaatattatcattaacaatgattgccattgatccgtctgtatgtcctggcatacctaagaaagaaaatgataattcatcaagattaataatatcgtcttcgcaaattaatatatcggcttttacagctttataaggtattttaacataaggtctttcattaataagttcttcgtcttcaagtcgtccggcatcaattttagatataataacaggtacattaaaatattctttaacttcttttaatgctaaaatatgatctgtatgaccatgtgttataaaaatgtatttaagacataatccattttcttctattgttttaataatttcagcagcattatctgctgggtcaatcagaattgcatttttcttatttgaagaaacaatatatacatttgtgctgcatgcacccaatactagttttgtaatattcataattctttacacacccaatttttatgagaatatatttatattgattatatcaattctgtgtatatataaatacgaaaaaaacacatgatgatatttaaatcacatatttctattcaagaatttcctgctaaaactttgattatcaaatcactattgacaaccacatcatctcatgatactatcacataaagaaactttgaatatcaaagtatatcgaaatctttaaaggagtatgattatgttaagaattattgctgacagcacatgtgatatatctaaagaagatgcaagaaagatggggattcagattgttcctatatctgtaaggtttggggatgaagaattcttagatggagttgagataacacacgaggaattctatacaagacttgctgaatgtgatgaattacctaagacttcacagccaagccctgatacattcatgaaagtatttaatgaagctgttgctgccggggatgatgtacttggaatattcatatcttctgatttatcaggaacatatcagagtgcctgccttgctgctttagacgttgaagaagaaacaggaaagaaattatacatggtagattcaagaagtgcatcaattggaactgcccttctaatcagagaagccgtcaagttaagagatgccggtgtaaatgtatctgatatcgctgctgcatgtacagagatgtcaaaatacatcaagcttacagctgttgtcggctcgcttaaatatcttaaaatgggaggcagactttcaggagctgctgcatttgcaggaacaatgcttcatataacaccggttgtaagtattgaagatggaaaagttgttgtgattggaaaaacaagaggaaaaaaagcagctgaaaaacttatgcatgataagctcatcaaagacggattaagtcttacaagagatttcatgtttggtcatatcaactgctctgaatctttagaaacatttattaataagagtcttacttacatatcggatgttaatggaaatgttggtgtaagctctattggttgttctgttggaactcatgtaggtccgggaacatacggaattgcttatgtagaagctgctgaatcaggaatgaaccgtgaaagcatcgtaaagacggcctgattcttatagcgtcgctgttctgatggaacgaatctgtcagaattaacaagttcatcaaattccttatacggaacatacatgtagtccatggtttctccttcctgaagggtaacatggacttctttttctattaaattaaggtaactgtgatatatggcatgcttaggcttatccacatagctgtagagcggaataaggtcatcagtagaaatcttaataccagtctcttcatataactcacgaattgcaccttcagccgctgtttcgcctttaagtatagaaccacctgtaacttcccacttaagagggtatgttttatttcgtgaacgttctgtcgtaagaagcttaccatccttagtcatagtatatacattgacaatgacatgatacaccccatcaggtaaagattttgcctggcttctttttaaatcgaaacctagcagcttttcattctcatcataggcatcccataattcttcgtcaactatttcaacaaaactgtcgtaatactgctcttcgaaatatatcatttcttcaatctgctggattgtgtaagatatattttcaggtgctattatccagacagtttcaggatcatcacgtcgtcttgcaacagctataagctctccgatatattcatcaacggcaacatctacacctaacagataaactctctgcttatcaagctcagaaaatccggctgttctttcgacatctacatagccgcaattaataggatagaccaccgaggggttatcttcatcagtgcttcctaaggggtggtcgattttcacggttacagtttcttctctcattatatctccttgttaaatgtttattaatttgatatacaaacatgaatatacaccaattagaacaaaggtgcaaccagtcttaatatacattgtccgattctcaagattctcggcttattgatgtacttgtcggttacttcctcacttcttctgaaaatgttgtagaaatcattaagtatgtcggcagcagtttccctgccatatacatacgcggcattttcaaagtgaaggtaaagacttctgaagtccatgttgattgtaccgacaacagatacttctccatcgcttacccactgttttgcatgaatgaagcccggtgtgtattcgtatattcttacgccgtatcttacgagatctgcataatatgatcttgtgaggctgtaggtaagcttcttatcaggaataccaggtgttacaattcttacatcaacacctctcattgctgccattgcaagctctctggacatctcttctgtaataagcagatatggtgttgtaatgtaaagataatgcttggctcccttaataatattaagataaacattttcagcgaccctgttgttattaagcggactgtcagcgtaagggacaacatactgattattattaacagccttgtatccgtaatcagatgccttgatatatttaatataatcatcctgtggctcgtctgttttcttaatagagttccacatagaaagaaacagcattgtaagagtcctaacggcatcgccggtcagcttaaggccagtatctttccactcaccatatgggtgtgttatgttaaagtactcgtcagcaagattataacctcctgtgaatccgaccttaccgtcaattacggtaatttttctgtgatcacggttattcatgaacatattaaatgcaagcttaataggattgaatacgcggcagtcaataccattggcacgcatttctttgatgaaatccttgttaaggaagaagatacttcctacatcatcatagaataatctgacttcaacgcctgcggcagcttttcttataagtacatctttaattctgtcaaagcttgaagcttcttcaatagcatgatattccataaatatgaatttctcagctttttcaagttctttaagctgtgcttcaagaccttcctcacctatggaatagaattcaatatccgtattcttatatacagggtatccttcatgattactcagataatggaactggttgtatatatatatatccttatctttaacctctttaagaatgttttcatcctgagaaagagattttttataggattcttctattgaattgaaccttttctttaccgcccttgtaacaatggaacgtccaaaaagcagataaataagtataccaagtataggaaatgcaagaattacaattatccatggcattttcatggctgaattagtagatgttccgtatatcttaagcacaagaataattgcaataaatgtgcttaataatgaaatccatgcgtagtccctgtaaaaatataataaaagataagccagccacgcaacctggataagtacaaatatacctgtagccagaagccgtccaaaactgttttttacggctgttttcttttcggttctcatatgcttgcgattatccataattttcttatctccttgtcctattaatcagattgcttttccagcaaactgtgtcatatacagctcataatatctgcctttagcagcaagcagagactcatgattacctgtctcgacaactcttccattatccataacaactatgacgtcagcgtcctgaatagttgacagtcggtgtgcaataataaggcttgttctgttcttcataagattagtcattgcatcctgaatctttttttctgttcgtgtatcaacacttgaggttgcttcatcaagtataagtattttaggactggcaacaaatgctcttgcaattgatagtaactggcgttgtccctgtgacagattctgaccgtctttagcaagcacagaatcatatccgccaggaagatgcataatcatattatggcagttagcctttttcgcagcagcgattatttcagtatctgttgcatcctgtcttgaatataaaaggttattctttacagtatcagcaaaaaggacagtatcctgtaatacgatggcagtattcttcctgagattctcacagtctatatctttaatattaacaccgtcaatagttatactgccattgtcaatatcgtagaatctcataagaagattgacaacggtagtcttaccgcttcccgtgcttcctacaagtgcgaccttctgtccggctttaaccttaaggttgaaatcatataatacctgtttccccggtatataggagaaatcaacatgattaaattcaatgttgccggtagaattatccattgtaaattcacctgatttgtcctcggaaggttcatcaagaacagcaaatactctttcagctccggctatggcagtctgaatctgcccccatatattggcaagctcgtcaataggtctgccaaactgcttggcatatacgataaatgctgatattacaccgatggatacatatcctttaatagcaaaatatcctccagcccctgcaataatgacgaagccgatattgttaatgacattcattacaggccccatagaaccaccaagaatctcggctttaataccaaccttagtcagttcatcagatgtattattaaaatcactgcatacattttcctgtctgtcaaatgctgtaacagtcttgatgccagtgaccatctcctcaacagtaccattaagctgtcccaaaagaacctgccgtctggaatagaatttcctcatggctttagataaattcttagttgcaaatatagtaagaatcactgttgtgcaggaacataatgcaagctgcggagacaaaacaaccatcataacgacagttccaataatagtaagaacgcctgagaataacgaactcatagattgcgatacagtgttagagatattctctacatcattagtcatacggctcataatgtcaccatgtgaatgctggtcaagatacttaactgacatacttacaatcttattaaaaagatcctgtctcatgtgcttaacaattctctgacttaatatggcacttaatcttgtctgtataaatgtgcatatactgtatattatgtataccactaacatgaagataagtatatgatttaaattattaaattttcttaaagaaatataatcaattgcctgactctgaagctttggagcatagacagagcatacaaccattataactacggcaataaaaagagcagtaattacaggtatttctttagcaaaatactgcataaggcgcataaatgtttctttactgttgacaggcttttcaacaacggcacctctgtttctgggtcctcccttcatgccgggaattctcatattaatctgtgatgtattcttatcctcagccataatatctctatctccttgctagttcttattcaactgcgaattatatatatcctgatatatagcactgtttttcagcagctcctcatgagtaccgacagcacttatatgtccgtcatcaagaattacaattctgtcagcatctttaacagaggcaattcgctgtgcaataataatcttagtagtgtccggatatgcatttttaagcattgaataaaggctggcttccgtctttaaatcaagtgcactggttgcatcatcaaatataataatttcagattgtttaagaatggtacggcttatggcaactctctgcttctgaccgccggaaagactcgttccctgttgtgttacaagagtgtcaaattcatctgctgaagtgctgataaattccatagcctgtgcgatagaagctgcatttgcaatgtcattgtcagttgcgttttcacggccccactggatgttctctttaatagtgctctggaatatttcacttttttgcagagctacagatatacgctcacgcagattcttaaggttatattcccttacatcaatatcatcaacaagcacgcttccttcgcatacatcatagaatcttggaatcaggttaataagacttgttttaccgcaaccggtttcaccaagaataccgatagtttcgccgggattgataacaagattaatattatcaagaatcttcttatcgccagttaatggatatgcaaatgttacatttttaaattcaattttacctttaatagaagttgtggcgttaaatgaaccgtttttgatagaaggctcacaggcaagcacctcattaattcgtctgcctgaagcaatacctcttgatgcggtctggaacatattagtcattcgcataactgcattaagtgactgcgtgacatatgtaattgctgccatgacattacctggtgttacagaaccgttggcaacctgaataccaccgaccttgataactgcaactacagacaggttgagaataatattcataattggctgcatatatgagaaaatcatcagcacattaagctgagtatttacaaggtcgtcattggattttccgaaccgctctttttcgtaatcttctttaacatatgctttgacaacgcggaaacctgatacattttcctgcattacattattaacattatcaagcttttgctgcagttttgaaaaaagtggattagctttagaaagaaaatatataacacatatggttacaagcggcagtgcacatgcgataactgcaccaaagcttagattaagggataacatgcatattatgccgccggcaaaaagcataaatgtccttataaaaccacgcatactcatctggataaaattctgtaactgtgttatatcgttggtaactcttgtgataagtgaacctgtagagaatttgtcagtctgttcgaaggagaaagacataatatttttaaatatatcttttcttaaatcattaccaaaattctgcgatgcaatattagcacacacaccacataagataccggataatccgccaagaattacgaatattatcatcttaagtccttcggtaagtacaagattcagattaccaacaccgttattagataaacctaaaacaccttcatccacgatggtgctcattaaacgaggctgaacgaggtccgcaagaacctcgcccaccatgaataaaggtgcaagaatggcaaaaagccagtattttttaagatatttcagcatataaaaactccctgtctttaaattaattattcaaaaaccttccttatgctgtcgtaatgaagaaattctcctctgtcagcgatagccttgatttcttctgctgtagcaaatctgaaaccggcagtctcttctgtctgtaaatgtatatctgcttctgtaatatccatgttaaacttatagatatcaacaaaataattatccttttcttcaggattatctcttctgtaagaaaattcaaagccgccatcagcatgtgatacatcaacaccggtttcttctaaaacctcacggcagacagcctgaaaagatgtctctccagcctggcatgcaccgcctgagacttcccagtgccctggtgcccatgctttagttaagactctctgtgttattaaaaatgtattatcatgtcttttgattatgccaagaacagttaagtgatagtcaccatccttcatgttccagtcattacgtttcatagtacggcctgtaagctgtttattgacatcatagatatcccatatctcgcccattattaatcgtctcctgttaaactaattatctttatgttttttcagatagtcaagtacgctgtgtacagcaacatttccttcaccaacagccttggcatactgataaggtctgcctgtacagtcacctgctgcatatacaccatcaatgttagtcttctgagttctgtcaacaataatatgtccaccagccatatcaagtcctgataataatacacccggattgatagaatcctttaagaagaaagctccgcttacagggatagcttctcccttgaaagttactgaagctactttcttatctccgtcaacacttgcaggaagtccgttaaaatgcgttatgttatcatattgtaacgtggtttccttataaggtgtgaaaagatatatatgattagcaagtcctgctaaaaatgttacttcatcctcgaatttaggtgatgcacatataacagcaatatccttattcttatataatgctccatcacatgtagcacaataacttacgccacaacctaaaagccttgcttcaccttcaatctctcttgttgttgtcataccaacagtcattatgacagctttggcttcatatatctcattatcagcaccggctgcaaaataaccgccgcagtcatatatggaattaacctgtgactctgttatagtaatgccacagtcgtcaatctgctttaagaacacagactgcatttcgcttcctgtaacagcaggaagtccaggataattcatgattttctcggctttctctatcttagtgcttagtgctcttgaaccaaaccatataaagttaagatttcttgctttagcagtgagtgcagcagatattcccgcaggtccgctaccgattatcataaggtcatacatattacatagcctccttattatgttgacttataaactagtattaattaaaggaaacggcttatacgctctttcatctgctcttcgcccatgatatgaacaatagtccacagatcaggagtattagctctgccggttacagctattcttaccacctctgcaacatctgatacattacccttgaagttctcaggattagccttgtaagccttcatatcagaagcatagccgttcttgtcagctatttccttaagcttgttaaaccacatgctgttatcatcattatggtcataagctgcaaggtaatcgttaagaataaccttaacctcgtcatcagctaatctgaattcatctctttcacctgattcgccatcaaagaagaaactgataagttcaaatatctgcttagcatacatgaagtcttttcttcttctcttggcaccaacacccatgtaaagtcttaatatagcaagtaacttctctttgtcagcaaaccataccttttccatctcaggctcattctctaatgcccagttgtgaaggaattcgtataaatcatcctctgataacttagaaagctcattcttacagatgttatgaagcttttctttatcaaataaggcacctgaaacactcatcttatctactgagaatggaaattcattgatatccttgtcagggaacttctcatgccattcctcaaagttagagttaaggagtgtaagaagatagaccttcattgtgtatggatgatatccgtcttttctgtagtaatcaagtgaaagctccggatcttttctcttagataactttctctttccacctgtttcctcatcaaacttcataagatgtgctgtatgtgcgtattttggcatcttaaagcctaatacatggaataattcatagtggataggaacagaagcaagccattcaccgccacgtacaactgtagtagttctcataaagtggtcatcaattgcgtgtgcaaaatgatatgttggaataccatctttcttaagaagaactacatcatggatattctctggaagcttaatctctcccttaatgctgtctgtaaatgtgatttcattctcaggacttccctgtgaacgaagtctaagcacataaggctttcctgccttaagattttcctcgatagtctctaaagaaaggtcacggcatacagcatatttgccataatatccagtaagaaccttatcagtctcctgctgtaatcttacagcctcaagctcttcctctgtacagaagcaagggtaagcaagacctttaagtacaagttcctttgcaaatgtatgatagatatcaactctctgtgtctgataatatggtccgtatgcattaaccgggtcagaatccgggaagcctgcaccttcatcaaattcaatatcaaagtatcttaaagaattgattacaaggtcaacagcaccttcaacagttctcttggcatcagtatcttcaattcttaagtagaacacaccaccgttcttgtgagcgattctctcatcagctaaggcactgtagagattaccaagatggataaatccagttggacttggacctaatcttgttacctctgccttgtttggaagttttctatatgggtatttctcctcataataatcaggtgtcttatccacatcagggaataagagctctgctaatttcttacaatcctgttcgttcattattaatctccttatattgctaaataaatctcataatattttacacattttgcagacgcatttcaaccttgaatattaatctgtgttaattctgggctttttattgtatttaaaatgcatatatgcctgtctatagctcacaagctccgatttcctcgcttagtatgagtaaataccgctatttacatagtttattacggtgtgcgaagtcaaacgcgcttcgcttgaacgagacttcacacaccgaacttttgtatatagcggtattaactcatacacagctcgtcaatagtcgcttgtgagctatagacaggcatatatgcatataactatattgaaaaagcccaagattaacatatattaagtatattgcggaatgcgtatgctacaccatccttgtcgtggtggagggttatgtggtcggctatttctttaaggtgtggggcggcgttttccattgcgattccggttccggcgtattctatcatgtctgtgtcgttgtctgcgtcgccgaaggctgctacattttcacgggacagacctaggtattctgttaagaacttaacacctgatttcttgccggcgtctttatatgatatctcaaggagctggcttattgaacttgtcatgtagacttcgtctgtggctttttttattctgtccattatgtctttctttaattcttcgtcgccgactactatgtcaatactgtctagttcatggcagtgttcaagtatgaaggatactatgtcatctttaagaatccttgttttcttgacataggcaagtgagtgttctgtagcaccgtatttttcaggatgtgcagtatattctgttgaagcgaatgcctgtccttttataaatgcttcatatgtcacaatatcattctcagtgagtttaagaatagtctttactgattctgatgtaagaacataggatttaaggcactctttgcctgcaatacggtagatggcagcaccattgcttgttattgcatattcaattccgggaacagatatgacatcttcaggcagcgtgtcaaatgcacgcccgctggcgatacatacatgtactccgttgcttatggcatcaattaatgcctgtctgtttacttctgacagatggctttctgaattaagagttgtcctgtctaaatcaagagccacaagtttaatatctgtattcataataatcaccttgtttccgtacttttcattgtaatagccattataaataaataaggctgtccctttaaggacaaccttatatgtatagtgatgatatgtcaatattttaagcagattttttatcatctttcgatggcttaatctgcccctgaacgatttcgataatttcatcagataagaaattaagctcgtctgcgtcgtggcaggcaattataattaaagcacctctttccctgtgcctgatgagtatgtcacgaatctgctctgtacctgtatcatcaagtgcattgattggttcatcaaggataatgatatcgggattctccatgatggcagcagcaattccaagtctctgtttcataccaagtgagaacttatggaaagttctcttatcatcaggatcaagaccaatctcggtaagagtctcgcgtatgcggttatcatcaatacgtctgcggatagatgcaagtgttttaagattctcaaatgcagtgtaattattaataaaagacggattttcaattaataatccgatacttggcggaaacataatatcttttccgataatctgtccattaatatcaacagtacccttaaccttgataagacctgatatagctctcataagcatagttttaccacagccgttctttcccttgaaaccatatattttgcctgattccatgcgcagattgatatctttaaggatatcattgctcttaattttctttgaaacatttgtaagctgaatatacatattaatcccccttagataaagtcttttttctttgaataaataataccggctgcaaccagtaatatattgattgccagcattaagcacagaccgtacggccatctgctgtatacatgaggtatgcggatagtcatgaaataattatagaaaaagaaccatttcatactgcatatactcacaataaagaagaacagattaacaacgaatccgaataccgcattgctgatataagcaagcagaaggcttatgcccgtcatagttacgagacacacaaaacacagtataataaccagaggcatattgaaatcaagttcaagcttagtctgtaaaaatattcttactgcttcggtgcctgtaatgttaagtgacattgaaaatctgctgccagtcataatcagaccaacaattgtgttagcagcaaatatacctgccatatatataattacagccagtaacatagtgatatatttgctgagccaccagccggaagctgaacctgagataacaagaatattctttccgacagctttctggtcagtcgttatgtaataagttattataaatgtgatatacagcactataagaatctcaaacagcggaatgtcaatctgcatgccgggagagaattcctttgcacctctgaatacatacagcagggaatctccaagagaaatactgctgattctggaattcttaatacatctgtatacatttgaaaaatacgatacagcctgaaatacgcaatatatatagaaaaccatatagaatttccagcacatcgaccagaagcgtctgatatcagcctttaaaatacataagaaagtattcattaattcttaagcatgtcctttctatagaatttaattacagcccagcttatcagaatcatatcaatccatataataaacggagttataacatcatcagcataatagataccggatatgtacacatctgactggttaagacacatctttctatagaagttctcaaaaggcagaacagatacataagtagtaaatatacatgcgtaagtgataataaaatcagcaaccggatttcttataatccagtgcagcgcacagattgtaagaattgttatctgaacacgcagaatatcaagcaggaagcagataagaattattacaaatgtgttctcagtcgtaatatttccattaggtataaaatttcttgcaacactgccctcttccagccagttacagttaataactgaaggataagataatgcacagcctgtcagtaccactgaattaatcagaggaaatacaatacttatccatgcacatttttttacacagttaagccacagcttcgacattgaagaatacagtacaaccctgaaatcagacatttcatatctgacaatggatataatcatgaaagctgcaacaacaagttcgagattgcatagaaaaatgttgtttggaaaatcataaaaaaacaaaaagaaatccgaaacacaaggtactgcgttatcaaaatatctgcttgtgtatggcagagtcctgattaatattgcaattacaattgtatatataattaatattttaatataatgtttatgtcgttctttaatcataggcaagcctcttatcaatgacggtcaaatacaatgcgcagcctttttggatagaaagaatatacaagactgatatcagaagaatctatcttgtcaagtttactttctttaaccatggaacttcctaatgtgcattgcaggcgcacttctttcttttcaccgggaacaactacaatacgtgaatcttttgatgaatacatagttactccgttgtgtgcattaagctcgtcagacaagaaaacgaatattgatggtgagaaattaacaaccttatcggatacattttctaattctatagtcataaccacaatacggctcttacgggcagtttcctcacgcatattaagctgctgacctgatttctcgcggtattcgtcgattgtatatacattataatcaacaggagtaatctttaaaccgtcaataataggaggattatcagatgtgtaagttacatctttggcattaggaaaaatcatattgattctcacggtgaatcctataaatattgcaataagcagagttattgctccaataattattattctataacgcttcattattctttcctttcataaaaaatataattccacatataacacagatgataattggttcacatatgtaggcaaataacattccgtcctgcagcttggttgcaggtgaaagcagagccataggattgaatgaataaatattcattacgcttttacataatgtagagataataccaagtccgtaataggtaacgaatggagatattattactaaaaatgtattgtcgataaagaatgaaaccgcaagtgaaacaagtgcaaatgaaccgccatatataaagaactgtaatacatatatcaatacatagataagcggatgttcacagaaaagatttcccattatatacgcacctgaatgaataaataagccgttgccggatggcttcaatgcaggaataaacatcatagttgcgcatagattcagtaaaagaggaagcatagttacaagtcctcctgagataaatgttgcaatgaatctggcagcatgaatcttattctttgacattctgctgtaatattgcagaatgtactggttcttgttatctctgcagaagaatccacaatacggaagtgctgcaagcagcataaatatatacagataagatgtagatataggcttaagccccataaacattcccatccacgaattaaatacagagaacggatatgtttccactcccccattaaagccgttagtaatattaagatgcggcttcgcacactcaataaatcctccaacagataaggcaagtcctataaaaagacttacataaaataatttgcttttaaataatcgtttaagttctattcttaacagaattaaaatatcgtgcataatcctcccccataaaagtaagtgtagtgatgttagttataatttattcgacttcttcaatgtcgttaagttcgacaaggtaaccactgtaatggtttccgccaagaagtttctgaaatgaaccttgaatataatatttatttgtatcagaatagcggtatgcttcatataaaaaccagctatcaaattcatcgccagggttcaaagtcaggtgttgctcgttgttttcagctaaagacctgtctataaaatttatacctcctaattcatatgttgtcccgtcaggatattcagctataattgttgatgtaaattgaaattttgaagttgtttctcctaaatatttaatatgaacctttatccagaaaaatctatgtccctcataaaatagattgccgttttcatcataaattcccctatatagattaagctgattcattacaggctggatatattcttcgtcaactaattcggtggcaaatgatttagatatagttgaatatacttttaatatcgtataatcaaatgagcctgtattatatgtttcattcatttttatgtattttatagaatttttgtttaattttacgattggttcttctgttatttggggttcattcgcatcaacagaaggtttctcttcattgtaagcagtgcttacttcaccattggaatctgtttcataatcgtagttataaagataagttttggtttcggctatgtcatttgtgttgttattggtatttgttgcgcagccacataaggcagttaataatagtggtataattattatatattttttttcaattattgacctccataggttaacttttttacaattagaagactacgttgtgcatagacacaacgtagctttaataataaatcatatataaatactaatttatatgtgatttgttttaaatgtctggattccaatagcctccaaaccatgcaccatgataatcatcaactgaatatccctcacatcttacacaagtcatattgtaatgttcttcatatacccagttaagcatattatgtgagtcatttacatcaaaataatactcgtatccatgagagacatctattcttgttcccgctgaatttaaagcataaacttttgcatactaataagaaccatcaatatctttgtccgtgcaagacatccaaacagatgatgacgtgtttttactttttctatctgtgtaatatgtgtctccatcaaaatcaaaggatgctccgtaccaaacatcatctccagcttttgatatcacaggtgcagtatacacaccaataaccagcatcatagtagcaaatattattgtgtttttaattatctttttaaatttcatattaaatatatcatcttaaagtagtaagactaatcaatttcagtcaaatcatttagttcaatcaagtagccgttataactattattgtcgttataattttgaaaattacctttaacataataagtgttgtcactagaataatttgaaagattatagaaaaaccacatgtcatattcttcattaggttcaagataaatattatcaagtttatggatagaaaaagatttatcaataaacattaaaaaacctaaaaaaagtatttcgttattagtgtctttgctgaatattgtagagtatatatccatagtcatggcttctttaccggtatacttcatatgtacttttacacagaaaaagcgagaagtatcgtcaatgagttttccagtttctttagaaatatcgcgttgttttgaaatttcatctgataaaatattgtgataattttcattaactaatgtgtaaaaataattagaatccgaggtgacataggcttgtgtaatagcacattcacaacttccaaatgaatatttttcattcatttttatgtatgtaacagcattttttttgaaattgacagttgctcttacaacatctctgggttcattcaaatcaacagatggtttttcctcatgatatgctgtgcttaattctccattaggttctgtttcataatcataactatatagatatgttttagtttctaacatattattggtatcattagaaggctgtgttgtgcagccacacaacgcagttaataatagtgaaaagacagttatttttttcagtttcaattattaagcctcctagatatctggataccagtaaccaccaaaccatgcaccatgataatcgtctacagaatacgcctcacatcttacagcagcgcgtgtatagccttcctcgtttacccagttaagcatattatgagtttcgttaacatcgaaataatattcatagccatgtgagacatcataatattgtccacttttataagcatatactttgccataataatatgaaccatcaatatctttatcggtgcataacatctgaactgaagatgatgtgcttttggattgtgtatctgtaaaagtagtttcaccatctacactaaaagcaacaccaaagctgttgcctgctttggatattaatggtgttgaattaataccaacaattagcagcattgctgtgaatatgacagcatttttaatggcttttttacatatcatattttgtcctcctgttaaattattttaaataagtacttatctcttaaaaacagaataacagccccgtacttaaagcacaagactgttattttgcggtttgtcgtaagatgcatgtttaacgacgtaagttacatattttattagtatagttgcaaaaacatggatttattcgacatcttcgatgtcgttaagttcgacaaggtaaccagtatagctgtcatcatcaatatagttttgaaaagaacctcttaaatagtaggtcttatcatgactatatcgggaagcttcatagagaaaccatgcgtcaaattcatcatctgggtttaatgttaaatgacatgtggaattttctgacaaagctctgtcaatgaaaccaagtaatccaagagaataatatgtaccgtctggatatttacatataattggtgatgtaaattgaatttttgaagtagttttacctgaatattttaaatgcatcttaacaagaaagaatctatgtccttcgttgaatagattaccattttcatcataatagccacgaaatttatttagatagtcaagtaatagctgtgaatattcttctccaaatgtatcagcgcaaaactgcttggaaacagttgaatatgcttttaagacagtacattcacatgcacccgaattataagtttcattcattttcacatatgtgacagcaccttttttgaaattaacagtaggttcaacttcttcgtgtgattcattcaaatcaacagagggtttttcttcatggtaatctgtatgtacttcaccattggaatctgtttcataatcgtagttgtatagaaaggttttagtttctgttatgtcatctgttttatttgatgtagatgatgaacagccacttaaagtgaataacattataaaaataattattattttctttttcaataatttttttcctcccaataaaattattgtttatatttacaaattcggtaagctttataagatatttattattaggaagctgcgttgtgcagtcgcacaacgcagcta

SEQ ID NO: 8493 - DNA, 42773 bp, Unknown
  gut microbiota DNA sequence
atttatataaaaaagacggatattaatgcataaatagtacttcatgcataatatccgtcaaaaatttgactttgtaatttgcccatatttcaatttttatcatatgaaaatataaatatatatctaaatcataaaatgtcctatattgtcaaattataggttttcaattaaatcaacaagtctatcctttaatatttcaacacgtatttttaattctgcatcattttttatgattgatttattattctttagtatatcaaaattattttctaataaattaagtgactgttccaatttcgcaattgaattaattcttttaagttcagaatcggagattgaagtctgacgttgttccttttccttctgctgctgcttgagtttttcaacctgagcttccatttttgctttttctctttcagctttttcttttgcttgcattgcaaatttaaccatctcgtctttatcaggctgtttttcttttgagttaccattgctttgaaaatcgtttatcttttgttctagcaattcaattgtatgtttcttatcttctatttctttagtagctgaatcaagctgctttttatactgtctcgcttcatctgctctttcttcagaaagtttcttaatagattggaattcagcattttcaattgtaccgtttttctgaatgattgaaagtattgtcttctgagcatcttcatcaagtttaccaaatttatctgcctgattaagatcaataccattggaattaagaagttcagataattctggaataagtttttctgctgttgtgtattttcttgcttgtcgttcagatatgttaagctggctggctatttcagcatgaatatttttaatttcacctttaagcttcttggcttcataaagttctaatagtctgcttacttcccatcgcttcacttccatgcttgattctcttacatcatggtttgcagagataagcataatttcttcatcaatatcagatatgtcggatttctctactttacatggaattcctgcaggaaaattatcacgatattctttatcagtcatctggcatatagcatggtatcttcgttcacctgatataagacgatattgatctgtttctgcatcatataaaactgaaaggttatgacggagaccattaacaagaatactttctttgagtgcttctattccgtcttgtgtatactgttcattcttaggattaggaataatcttatcttttggaatatatttaaaattgtattgtgtcttagcctggatttctcttagtttttctccaccatcattattaagtacaccggattttgttgatccagcactaaaatttttcttagccatattatttctctcctttcagatatcttgcaagcttgcggtaatgtgctgtgtccataagtccaagatagtttacaagttcaacgtaatcaagggatgcaggacactttttatcgtatgataataatggttcaaatgttgtatttgattcattaacagctatgcagtttctgatagatattggaagaaatctatcaccgaacatattttcataactttcatacatctgtctgaaaagagttgttcttcctgccactcttgtcataaagataccagcaaattcaatacttaaagcatatttatcgttaagctcttctatagtatcgaaaagagacataagaccatcatatgagaaattatcgacacaaataggagtaataatcttatcactggcacacatcgcacatgatgttagatatgacttgaacggagaattatctataattatgtaatcgaactcgtccttaattaaattcaagttatagcgtaaatataattcaacattaacctctttcattttgtcatatattttgtaaataaggctgttaagttctcgtgatgctgtaagtatagaaatgttattatattcagttttagttatatagttcataacttcatctttattattctgtttctcacaaaacagacgttcgtaatctatatctggattagcttctgcttgaccatacattttagttgtattcatctgtggatcaaggtcaataagcaatattttgtattctgagatagcaagaatctgtgctattgtaattgctgatgtagatttgcctactccacccttttcgttaatcaaactaattacttctgtcatagtttttcctttcgcatattaatataagtttattatacaacattttgatttcttttcaattgttttcgggaatgtttttaagaaatatttgaactgagttcattttttgacataattatactttttataaaaaattgcactcagttcattaataattataaaaaataataatcagataggcatattatgtatcctgaaatgtaggtaacaactaagtaacaattatataataatgatttatcaaattgaataatataatacaagatacatttgaacataaaagatattatcaaaatattatgaactgagtgcaatttacattaataacaaaaggagaataatgaatagtcaatttataaaatttgaactcagttcacaataatataaaacattgataaattaatgaaaatcattacgaaaaatgaactgagtgcaaattataaaattaaagcaacaatcagaacatgtgttttatatgtttcatgtgaaacattataacaatatatagtgcttcagataatctgtaaccacaattctttattacatctcttgagttattgtaattgtgactgtataattaacaaaaatattgaataaaaaaagattaatgaggttattatggtatttaatcatacatacagaattggacttgaagattgcggaaaagaaaatgaagctactaacaaagcaattcttacaattcttgaggatattgcaggcttacattcagcaacagtgggacttggactcaatgaaattaataaaacaggctgtgcgtgggtgattttgaaatggcaggtacagattatcaagcgtccagaatataatgatgaattaaatgtttatacatggtcaacatctgcaaataagctttttgctgatagagattttaaagtgcttgataataatggtgagacaattattattgcaacttcacgatggatatatatggatattaacaaaagaagaccagtcagaataaccgctgaaattatggataggtatgaatctgagccagaaagacgtgtgttttcagaagaaattactaaaaatgagattcccgatacagaatataaagagatttcgtataatattttaagaagagatgtcgattatcttggacatatgcataatataagttatcttgatgcggcatatgagattatgccagaagaatactttaatggtccacaatttaactatataagtatcgattattgtaaagaattattgaaaaatgacgaagtaaaagcacatttttaccgaattgacaacggatgtataatatcattaaatacggaaaagataaattcagtaattacactgaaatattagcgaaagacagttatataaaactgctggaatccagtatatattagttatattggggattagctgctttgaaaggagtatttttatgagtttgattaataaagaaaaggttttaaatggtgtaggaaaggctgtagatgttactaacaaagcagcagataaggcttcttcatttgtcaaagaaaagaaaattgacaagaaagctatgaaagctgcgaaaactgccgaaaaaggtatcaaaatagcaggaaataagattggagaggttgcaggagaaatcgtggcaggttataaaagtaaggcgggaggtacttcttctacaggcagcacagcaccagatatcattgtagatgccaaagatattaaagaacatgtaagtgatgaggaatagtaatgcaaagtgatttttcacagggaaaagtctggaaaaatgttattaatcaggcaattccgcttatggtcgctcagcttatacagattctgtataatgttgttgaccggatatacattgggcatcttcctgttattggaagcaatgctttaacaggaataggactggtttttcctattacaacacttgttgcggcatttacaaatctgttttcaacaggtggtgtgccgctcttttctatggcaagaggagcaaaagaagaaaagaaagcggaacttatactaggacaggttgtatcattgctttttgttacatcgctggcacttatggcgttatgctatatatttaaaagaccagtactgttccttttcggagcaagtgaagaaacttatgtatatgctgaccagtatcttaaaatatatcttttaggaacgatattttcagtgctttcaactgggcttaacggatttattaatgcgcagggatatccgaaaaagggcatgatgacagttatgcttggagcaataattaatctcatacttgatccaatatttatatatggattacatatgggagtatatggcgcggcgatagcaacggtaatcagccagggtgtgtcctttgcgtgggttttaagtttttttatgggaaagaaaacattttaccatataaagaaagaaaatctgattcttaaagcagggatggttggaaagattacatctcttggaatatcagggtttgttatgcagggaactaactgccttgtacagattgtatgtaataaaatgctgtttatgtatggtggggatatgtatgtaggaattatgactgtaattaattcagtcagggagattctttctgtccctggtagtacacttggtagtggagcgcaacctgttcttggctacaattatggtgcaaagcaatacgaaagagtcagaaaagcaataagattcacggctgcgattggatttttatatatgctcattgcgtggcttgctgtaattatatttccgaaagagattctgtcggtattcacgactgataaggctatgatagtttcaggagaacatgcgttaaagctgtatttttttggattcttttttatgtcattccaattcgtgggacagtcgacatttacagcacttggctgtgcaaagagggcagtatttttctcaatattcaggaaagtaattatagttgttccgcttacaattattcttcctatgctgggacttggagttgaaggagtgtttattgcagagccagtttctaatgcaataggaggtctggcaagctttacaacaatgtattttacactttacaaaaaactgccggaatagtattctaaagacaatgatagcaaaggtgccatcgcttctgtatagggagcggtggcttttttaaaatcttggaaagaaggataatttatggatatatttgacataataggacctgtgatggttggtccgtcaagctcacatacagcaggtgctgtcagaattggttatattgcaggaaaacttatgggagagccaattgcaaaagcagaaatccttctatatggatcgtttctggcaacaggaaaaggacatggaacaaggaaggcacttgttgccggacttcttggaatgaaaccggatgatatgagaattccggacagttttgagattgccaaggagcatggcatagaagttgttttcggagaatcagcattaagagatgcacatccgaatacagcccagattttcctgacatctgtaactggcaagaatcttgaagttgttggtgaatcacttggaggatcacgaattaatattgctcagattgacggaatatctacgaatttttcaggtgattatccgacacttgttgtgcataacatggatcagcctggacatgttgcagaagttacatcaatgcttgcacacaaatcagttaatattgctgccatgcagttgtacagggctggcagaggcggcaattcagttatggtgcttgagtgtgaccaggaagtgccagaggagggaattaactggttaagacatgcagaaggtgttgtcaaggtgacttatcttggcttggaataatcataatgcagaatttgattagcataattattggtgaaaaatggaggatttatggcagaatatcattcaatcagtgaccttgtgaaattaagtattaataataagcaggaattatggcaggttgttcttacgggacaggcacatgacaagcttatgtctgaaagagatgtatttgcacagatgaaaaagatgtatcaggctatgaagagcgcagatgagcaatatgaccagcagttgaggtcaccaagtaaaatggctggtggtgatggatataaaatgcgcatttataatgagtctggcaggaatatatgtggtgattttattggtgtggttatggaaaaagcattaaagatgggggaatcgaatgcatgcatgaagagaattgtagcagctcctacagcaggttcatgcggtgttattccagctgtattactgtcttatgaaaaatgttttggtgttacagaagatgaatgtgtaaaagcgttattaattgcggcaggaataggtgcggtaattgctgaaaatgcatctattgcaggagcagcaggtggctgtcaggcagagattggttcggcaagtgcaatggcagcggcgggactggtttatatgcagggagcagatagtgaaggatgtgcaaatgccctggcacttgctttaaagagtatgctggggctgacatgtgatccggtttgcggattagttgaggttccatgtataaagagaaatgtttctggggcagtcaacgcaattacggcggcacagatgacaatggcaggtataaagagcgtaattcctgcagacgaggttatagattccatgagaagaatcggtaatgatatgccggtatgtcttaaagaaacaggtgaagggggactggcaataacaccaactgcaaaagtgtataagcgaaagttaaataatattgacaactaatgtcacaaaagttgacgaaaaactgacaaaaaatactgtttttttaaaaaaaatggcaaaaaatctgttgattgacaaaaataatatgctataatatagatgattgtaaaagagattgaatttgtttgaatgaatttgaatgattttacaattaacattacacacagatataaggataactccataattccttatatttgactatatttctatcccctctactcatccccggttcccccagaaccggggaagttttttatgcgcggatagcgaggagaatataaaaatgcgctgtaatcatgcttgcatgaattgaaacttttttacatgtgggcatcagtatatgctataattacacaatatgtttacattcagacaataccggctatgagtaaataaataatcagaggatggagttagttatgacacgaaaagaacttaatgaaattaaatcacaatatacattagaggattgtggaatattaaggttatgcggatgctatgttgatggtgagcgaaataagataacacagtttaatgagaattttcttaatcttccggaagaggagaagcataaatattttgatatatttaagaagactctttcaggaacaccaggaaagaatctggttgatatgaagtttaatgtcgatgcgtatgctgatgagggcgcaagaacatttttaatgaacttaagagacagcggacttaaggatgacagacttcttaacgaattctatgacaggattatcaataattacagctatgttggtaattatctgattcttctaattaatcaggtatatgatattcctgcggttactactgataatatagagatggatgatgcatctgatgaggtttacagctacattttatgcagtatatgtcatgtgaatctttctaagtcggggcttgggtatgatgaggaggacaataatttccacgataagaagcagaatcatatggtagatgtaccggatgtgggatttctgttcccggcatttaataagagaagtgcagatgaggatatgacacttttctatactaaagatgtcagtgagtttgaggacgggcttatcgactgcctgcttgactgtgcggttccgcttcctgcaaagcagcagaaggaaacatttacatcacttgttaatgaggcacttggtgaagaggctgaccttgagattgtgaagaatattcatgaaaatcttgagcagattatagaagagaagaagcaggaaagtccggcaccggttatgcttgataaaactgagatgaaggatctgttggaaaaaagtggtgttaaagaagaaaagcttgagaatttcgaggaacactttgagatggctgccggtgaacatggaaagcttgttgcatcaaatgtttcatctggtaagaaatttgaagtgaaaacgccggatgttgtcataaagattaattcagataagacagatattgtgagtacacaggtaattgatggaagacagtgccttgtaattcagattgacgagagacttgaggttaatgggatttcagttaatcctgatacaggtgaggttatagacagaaccgctgagggatatgtagaagaatgattatggaggatgagtctgtatgacattgaagaagttgctgcataatttcaatgggcatctgcacacggttaattcccacagaaggctggtgagaaaatactgctttaagcttggattatacaggcagggaatgatgcatgatttgtcaaaatattcaccatcggagttcataccaggagttaagtactatcaggatggacacagaagtcctaataatgcccagcgtgaagatgaaggtgtttcaaaggcatggctgcatcataagggtaggaacaaacatcattttgaatactggatagattacgatgtcgatggtaacagcactattcttgcaggaatgaaaatgcctgtgaaatatgttgctgagatgttttgcgacagagttgcagcgagcaggatatataataaagacaagtacaaggattcagatccattggattactatattaaggggcttgggcattatattatgcatccggaaacagatgcacttcttcataatcttttgaagatgcttgctgataaaggggaagagtatacattttcatatataaaagaaaatgtgcttaagaaaaagaaaacaggcggattttaacatttttttggtgaaactttaatattttgacaagaaaaaggtttttaaaattggcgtaatggtgtataatttaaagaacaatatgaacaaaagattgttctggtgaataatttaataagaggaaagggaggtcttataatggggaaaatgcatactaaggccgaaagagctgaaaaagttaaagagattaaggctgagaatagtaagaaggtaaaagaggtcagggcaaagaagaaagagcttgatgctgaggttaagaagaaagccagacaggttgccgccgatggaaagaagagaagagctggtattacattcagactggttatgcttgctattgtaccggtaattgttatggtactggggcttattacaactacagtcttcagtcttaagtcaggactggaagaagaggccatggatggacttgagctgttaagcggggcagtacagagttcttatgaggatattaaaggtaactatgaatataagaacggtagattattcaagggtggcgaagaattgactattaaaccggctgcacttgatatatatgtcaagaactccaagaatgatgtccaggttacacttacatatggaaccaagagagttcttacaacgcttactgataataagggagcaagattaacgggaacagatatatcaagtgaagtgtgggatgtagttaagacgggaaagacatatagagatactaattataaggtagatggaaagagatactgtgcagtatatgtgccactaaaggataataatcaggttgtaggatgtgtatttgcaggacagcctacatcagatattacaaactatataatgcagaaggttggaacaatgcttatagtttctgcagtagtacttatagtagtaggaattgtggcaacatttatagcacagagtatttcaaagtcgattaagagagcaagtgtatctgtaacgaaagttgccggaggagatcttacagtagaggttgataagactgtacttaagagacaggatgaaatcggagacatgggcagagcccttgaaactcttataattaagttaagagaaattgttggaagtcttgcgaagtctgcaacagatcttggtgagtcaggtaattcaattgactctatggcttcacagtcaagtgttgctgcaggagaaatcagtacagcagtagaagagatttctaagggtgcagtatcacaggcagaagatattgagacagcaactaatgaaattatgacaatgggtgaacagattactcagatagttaataatattgctgaccttacaaagacatctaggaacatggaagaagccgaaaatgcttcacaggatacaatgattgaattaagtgatgcagtacagagaactactgatgcagttgcaagaattgcaaaacagatagagacaactaatgaatcggtagataagattggcaatgctgcttcacttattgcagatattgcaagccagacaagcctgttatcactgaatgcttctattgaatctgcaagagcaggagaagcaggaaaaggatttgcagttgttgcatcagagattcagaagctttcatcacaatctgacagcacagcaagtaagattcaggagattattacagatctccagaatgattcgaaagaaacacttgaggttatgagaagtacagaagttcttgtaagagaacagtatgaaaagcttgcagcaactaaggaaagattcaaggaagttggtaatggcattaatgtttcaaagcgtggaacagatgttattaaaggcaatgcacaagtatgcgacagctcaagagttaccgttgttgatgtaatatctaatctatctgctatatcagaagagaatgctgcttcaacacagcagacaacatcttctatgcaggagcttaatgcaactattaatattcttgcagaaacagcggctaaggttaaggaagtatcagaccagcttaatgaagatatgaagtattttaagatgtaatcagaataaaaataccggttaagtttgtatatattaagaacttaaccggtaattttttatgctttttctagtacatttattaattcctttagctgtgctcggattttcttacgattgatatccgaataaccaatttcgttggcaatcttataaagatattcctgaaagttctgtacaatctgtgggtgattgaaatcaaaaaccatgcttggcagggctgtacggataagcattgcttctgatccttcattaacaattatacatacattatcatctggatcatattgtatcggaacaaagaaatagtcaggatgtgtatccataattcttataatattctgcagatgctttgcataagaatggggcgtgtaatatacagctgtctgttgtcttacaacaggaaaaataaccggcacatgaccagctataacttcttcagcagttgccagtggacatatatcaacattgcgtaaatcatcaaatacagtggataactggtaagaggtacgcagatttacaccaaggctgtcaggattgttattaagaaactctgttatcagttcttccggcatggctgctggaggaagattcaatcccttctggatatggtttacatgggtgtttaagatacgctggaaacactctgaaacctcctctgctgattcatatatattcatggttggcctgcagtaggataaaaatgttttgaattcattctcttttatagaaacaactgcaggttcggtagtcataacagtaaatgaattatcacttaccgttgaaagacaatcagagtaaactgcaacatgcggaggataaattatgcttatttttgaaaacagattatcgcgcatgcgtggatagtagtaagatttcacccgtccggtaatatatgccggaacccagtagaaaaactcttcaaaaaactgagtggtattaaccggagaaggggaaatctgacatattgtatatccataatctatcaatctgagcagaagctcctgtatagaattaagaatttccttattatcaaagatactgtaaacatcatcatcaatccatacatatactgtaccatgctcttcaagggtaagaagatgattgataaaactgataacagcctgtttttttccttcagacttataaagaatactggtagcattgggaattacatcaatggcttttattcccataatattattagtgcctgatgaagagatattttcattaagaatgccctcaaccagtgtattggtctgaggaagctcatctgccagccactggtaaagcatatctgaatattcaggcaaaggtctggaatgattgaatctgctataatcagacgcaagagccaaagcctttctttgatagctgagtttaattgaagcggcaaaatagtccgacattcgtcttaaaacttccttgttacggggacattttctcttgccactgcgatacaggcttacagcggaattatcgatgccaacagcaccagccagagttgtattgttagtgtttgttatatccatgagaaatttgaatttgtcattaaaagtcataagctcccccttatgcaaatgcgtgaacgccagaaataataagcgttgtaagcgtgcgtgccatttcatcaagagtgataccgtcagggttgattatccattcataatacgcggaaaccattccgccagcgacaaagttagaaatcagaggatattgctcagaaggaacattcatcttaatatccttgtctatcagctctttgagaagagtttcctgcaatgctttctggagcctgttaaaaagcaggcttccattgtccgaagcaaaaaggtttcttgcaatatctgcatcagacataattgtattaagaaatgcaaataaagtctgaggtgaaaacatattataatcctcagacatagcacacaaaagatctttaagagatgttataagttcattaatcccttcatcaagaacatcattgacagttgaataatatgtgtaaaatgtttttctgttaatgtcagcctgtgcagcaagctcagtaactgttattgaatttagctttttcttctgcataagctcaacaagtgcttcgtaaatcgcttttttagtttttagaattctgcggtcagctttaatttcatgtgcagaagtaaaactgatttcttcagattttgccataataaactcctattaatcagattataaaatatatataaaattgttatgaaaatactatgaaaaatgtattttgcagttaactatattgtacaacatttgcagataatagtaaacaaaatgcgacaaaatgttacataagtgccaaaaagaaattaattgacctttgaaaatatttgttaaaaaacatacaatgctgattgtaaacatattgtgtgatattggaacatttgtgtattaacttgtgattaaatagtaatacgcagataaatgatttgacagcaagaggtatcggatgagaaagaaaaatgcatttattaatgtaacagccagtatggggagaggtcttttatacgcttacctgtatattatgttcagacctaagatatgttatcagagcagaaaagctaaagaggaaattgaaaaaggcggagtcatatttattggcaatcatgtgggacataatgacggacagatgttttatatgctgtttaagaacagtgtccttataatagccaaagactgggctgataagaagattttaaagtggcttacaagcggtggtaagtttatttctgtagaccgctttggaacagatattacatggataagaggagcatcggagcatcttcgtgcaggagataatatgataattttcccagaaggacatacttctaagacaggggttatggatgaattcaagccgggctttgcaatgttggcagttatgtcaggtgcaaaaattgttccggtatataatgacggagaatatcataagctgtttgggaagagacttaagctgtatgttggcgagccgatggaacttactaaagagggaaaggggcttaatgcggagtatctcgcaggggagtgtgcgaggttccgggaggctgtggagcagctcgaaaggtagtgacaggacggacggggctgcggccggctggcgattccgcatttagttaataaaatccgggaaggtgtcagtcgtaggttcacggtttatgggtttgtgtggaaaaaaccgtctgaggacgccggcacttagcaaatgcgaggtgcgaggacgaagtcctcgcaccgaagcaggagcttagtgaccgctgcgtccgaagccgagcgggagcgtgtttttggagcataaacccataaaccgtgaaccgtccgtcgtctgcataccccacccaccggatttcataaaataaatcaaaaggagattttatcatggtatttgagaaattaaaggaaatttttggaagggttatgccacagtgcgacccggcaactattacaatggacagtgttcttgcaacagatttaggagttgattctcttaatatgatgttacttgctattactgttgaggatgagttcaagatcagattcagttctgatgccaagcttgaaactgttaaagatattgttgattatgtagaagctaacgttaaataagaggcgcttatgagcaaagtaaagacagggcttgtactggaaggcggggctatgagaggtattttctcagccggagttcttgattacatgcttaagaaggacatttattatgactatgttataggtgtgtctgcgggggcaggtaatgcagtaaactatgtatccagacaggaaggaagaacaaaaaagataattactcatgaaaatgctgaaagctattatggagtcggacagcttttcgagaataagaagattcttaatcttgaaatgctggtagccgaatatgcacttaaagatattccttatgattttgacacatttttcgcatctaagacagagtgtgaaagtgttgttgttaattgcgagactggaaaggctgagtataaagggaattttaagactaaagatgaattcctgaagtgtcagatggcaagctgctctgtgccatttatatgcgaacctgttgaaattgacggctatcattatcttgatggaagcatcattgattcgataccggttgagagagcagttgagaaagggtgcgataagattgttgttgtacttaccaagccagagggttctaagcctacggattattctaaggtaaagaagcttatcgagtggagttacaagaaatacccagagctttgtgaggttatggcacacagaaggcaggcttatgacaggcaggataagttcatgaaaaagcttgtggaagagggaaaagtctttgttatccgtccggaggagcagatgataagacactttgagaataataatgaaaaacttcttcaatgctatcagtatggatatgacacgatgagaaaacagtttagaacatttgagaagtttatggaggacaaagcctctcctcgctagagaggctcggattttcctgcggaaaacaaggaggattaataatgaaggttttggtagtaaacggaagtcctaaaggacctaagagtaatactatgcagatgacaaatgcggttcttaaaggacttaaggagactaatccggaagctgagattgagcttcttacagttaaagatatggatattaagccatgtatgggatgcatgagctgttggggaaagacagcgggacagtgcgttatcaatgatgttatgcaggatgttcatgtcaagttcatgaacgctgacgttattatatacagcttcccattgtatttcttcggtatgccgggtccaatgaagacatttgttgacagaattatgccacttatggagacttacaagggtaaggtaagagatatcggagatgatgcattccacgagttccgttatgatatgggtgataagaaatattatgttatatcatcatgtggatatggaagaacatatgagatatatgatgcccttatcaaggaatttaattttatctatggcaagggcagatatcaggctctcctttgtccgcagagtgaaatgtttgcaattccaccaatggtgaaccagattaatgaatatcttaagagatatacagaaattggtaaggttatgggaaaaggtgaggatattcctcaggatatgattgattatgcttcgcagccaatgattccacagagagcattagagaagcttatgaacaattactgggatgctgttaccccagagaatcctcttccggctcctaatttaagataagaggcaggttatgaaaacatattacatgtttggcgactcgcttatgcgcggggttatgccggatgaagcgtggaattatcacagctcagatgcaatcggatttgatgcaatgcaggcacaatataatatgaagtttgtcaattacgcgatgccgacattcacatcagagagagtaaaaatgtggcttacacagataatgtcaagtcatccggtacctgatgtggcatttcttgaatgtggcggtaacgactgcgactatgactggaagtcgatatgtgatggcaaatgttactatgaacacaggcacagagttgccccacaggattttaagaagaattatgaggatatgatacatttgttgcaggaaaagggagcagcagtaacagcagtaattgcacctccgattgctattgaagtgtatctttcacatctgcttgaaagcggaatcagcagggaagttatgtcagaatatgtgaactcagttcagcagatgcaggacgagtatgcagaatatggcgacataatgagagctgtcgccaaggaaaacggctgtgaaatattaagtcttcgtgaaagctttcttgcacttgatgacatgaaggcatattatagtaaggatgggatgcatccgaatgaggcaggatatgcacttattcgtggtgattttgaaaaatattttgcatctgcagcaggtattatatagaaagatgagggttataatgtttaatctgcgtttcaaatgtactgttatatcaagctggcacatggtgcttcatgctgtacctaaggctaataagatgattgccaacaagaaccgctattcagagaaagaaagatttgtatatgccaagtggattattaattacatgagaaagcatgccagaacaagaaccagggtgtatggcagagaaaatattccaacggacagcaattacataatgtatcctaatcatcagggcaaatatgatgcactgggaattattcttgcacaggaaaagccgtgtggtgtcctctgggggaaaaagcaggctgaaagacttatgagccgtcaggtatgtggtcttattgatgcagtcgttattgatcttgacaataaccgtgacaaggtaagggctattatggatgttaccagacaggtcaagttaggaaggaatttccttatatttcctgagggaggttacactgacaataagaatgaacttcaggaatttcaggctggctgcttttcgtgcagcttacagactaagacacctatcgttcctatagcactttttgattcgtataaatccatgaatagcaatacatttgaaagagtagatacacaggtacatttcttaaagccaattctttattcagagtatggcgagcttaagaaaaaagaggtcgctgagctggttaagagcaggattgaggaaagaatggctcagattaaggctgggaaaattaatgaaagctatgaattaattggataataaaaacacaggctcagggaaataatatgttccctgagttttttgaccaaattctaaaatattcgtttcaatggttgacatgttctaagtacattgataaaatatttaaggtttacttaataataagatagtataaggaatagtatgttgtttggtaataataagaaaaatgcagagtatatcgttgacgtacattgtcatataatgccagggatagatgatggttcaagagatataacagaaactcttgagatgcttaagatagcacaatcagagggaattacacacatgattgctactccacattttaaaagtgggcatcgtaatgcttcaccgcagaatgttaaggaacttattcaatctgttggaaaggaagcagccgcacagggaatagatattaagctttaccagggcaatgagattctgtttcatgatgagatgtgtgaggaacttgataatggaaggataagcagaataaacggaactgattatgttcttgttgaattcatgccatctgatccatatcagtatataagaaattctcttgatgagattatgagtgagggatatcagcctgttatagcacatgttgaaagatatggatgtatggttgatgacattgagaatgtcaggcgactcagccgcatgggggtagagattcaggttaatgcatcaagcattaccggagatacaggtaaagaaattaagaagtttgtacataagctattaaaagaacagcttgttgattatgtaggaacagatgcccatcgttgcgatggcagcagaacacctatgatgaaagagtgcagcaggatgctttataaaaaatatgatgaggggtatgttgacagtatattatatggcaatgcatttgacagactgttagcagatacgaataattaaaggagaattaatgatggaaactaataagagtacagatgagattgaaatcaatcttggagaaatatttgcgttattgcttcataaggtgtggattataatactggcagctgttgtatgcggtgcagtaggatttctttacagctattttcttataacacctcagtatcagtctacaactaaggtttacatccttaataagcagaacagtacatcagttacttatagtgatgtacagctttcaacaactctttctaaggattatgaacagcttgttacaagccgttatgttatagaaggtgttattaaacagcttaatctggatgaaacttatgaaagccttgtgggaaaggtttctgcaactaatacagatgatacacgaataattgctattacagtaataaatccggatcctcagcaggcccagaaggttgctaatgcggtaagagatcttgcagcacagcatattacacaggttatggatattgaggctgttaatgtggttgattcagctaatcttccaacaagccctgtttcaccatcagttcctaagtggacactgattggagctgctattggtattataattgcggttgccgttgttgttatacagcatttgcttgatgattctattaagagttctgaggatatcgaaaaatatttaggtatcagtacacttgcacttattcctatgaatcaggctgaggaagaaactgccagcagaaggaggtctccccggaaaggtaaagagaaagtagtacttggcactgatgatgagaaggcaagaagttttaaatcatctgatattaataagaacactaataacaagaacagtaaaagaaatgctgatggcatagagtttatggaggactagagatgcaggagttttcagtaaaacagagcaaccttgatttcaggaccagagaagcttataagatgttaagaactaacatagaattctctggtgataataataaggtaatatttataacaagcagtacaccaagtgagggaaagagtacagtatcttttgaacttgctatgtcttttgcgcagaatggtatgaagacactgcttattgatgcggatacaagaaagtcagttatgaagaacagaggtaagaaggggaagattaaatatgggcttactcattatctttcaggaaagaatgaacttaaggatgttatatgcgtaagtgatgttcctaatttctgcatgatatttgcaggtcctgtaccacctaacccaagtgagcttgtaggtaatgaaagatttactaagatgattgaagaagcaagagctacatttgacatgattatcattgatacaccaccaataggaagtgttattgatgctgcggttatttctaaggtgtgtgatggcggaattcttgtaatcggagcaggtgatataagctataagtttgcaagaaagtcaaaggagcagcttgaaatgacagggtgcaagcttcttggctgtgtacttaataaagttgatatggcaggaaattcttattatggtaagtactatggcaaatattatggcaagtactatggacatggggataataattagttattgagatgatggcggcacataagtcaaatgtgtcgtcttttttagatttaagaaaggatgtatgtatgaagaagatattaaaatatactggactgtcaataagtattattatgcttacagtatctgtggtgtttatagatcttttaataaatgtcagggttgttccagttaaatattgcatcattgctgcagtagtgcttgttatactaacggcagtaacagcatttacacaaaagtggtttgttccaggaattattacgaagataattgccattattatgattgttgtgcttattatgggaagcatttaccttaatcagacaagacatatgataaacaagattacaacaactcaggaagaaaaaattgttatgggcgtgtatgtccttaacgacagcggatatgacagcgtagatatgcttaataataaatccattggtataggaacagctgtggatcgtgaaagtactgatgagcttattaaaaagatgggtgcaggtggatttatggcggagtatccagagtattctaatataatggagctggcagatgctttgttgcagggacagattgatgctgccattatgaaaacgagcagtattgaaatgattgatgagatgggagatttcactgggtttgcgtcagatgtgaagcttatatatagtggtgaatttacaattaaagtggcaacgacagaagagaatgttatagataattatctttcaagtgatgatgttataaatgtatatatatcaggaattgattcaagaggcggtattaatgaggtgagccgtagtgatgtcaatattattatgtctgttaataagaagacacacaatattcttatgattaatacgccaagagattattatgttccactttctatatccaatggtgtcagggataagcttacacatgcaggtgtttatggaattgagtgttccagaaatactctggagatgctttatggtatccagattgattattatgtaaaagttaatttcagtggatttgagaaaataattgattcactcggaggtgttgatgtgacacttgattattcagcaactcttagtcaggctggaaatctcacagtacataatggtgttaatcattttaatggtgagcaggcacttgcatttgcaagagaaagatacgcatattcagatggggacagacagagaggccgtaaccagatgatgataatggaggcagcaattaaaaaagcttgttctccggcaattatatcaaattatacatctgtattatcagaagtgtctaaaaatgtaattacagatatgagttatgattttattgcagagcttgctcagacacagcttaatgatatggcagtatggaatattacacagataagtgttacgggagctggaagttattcatcaacaacatattcaatgccagggtggtcgttatacgtaatgatcccagatgaggaaagtgtggagaatgcgaaggaacagataaaagataattataattaacattttaattaatattttaacgaaaaacatagaaacttatatgaaggtatgatattattttattataaaacatacgtgttaactgaatagagaaaggaattgactatatgagaattaaaaggttatcagcgttattattaagtgcacttcttattacaagtcctattggatatatgactgtaaatggagacacaattgacgcaaaagattattcgcagcaggtacagtctgtggattctgcgtatataggaagttacataccaagtagtcttgatagtgatgctccggtatatatatcggatattgcaacatatgcacagagaaatgtaccatcggcatacccagaggatgtttcttcatataagaaggaacacccatcaagaaatcagaatccttatggaacatgttgggcattctcgtctataggacttgaagaatttgaccttatagctaagagtcagagagattctagtgttgacctgagtgaattgcagcttatacattttacatttaactcagttattgatccgctcggtggaaccaaaggggattattctaagtattataataataataccaacatgtcatatctggaaaagggtggtaactacgagtatgcagtaaagagactcagccagtgggtaggagctgtcaatgaatcagatgttccatatgctgatgcccagacagtatataataatggtcttgataacaaatatgcttatgattatgatgtggcacatttacagaatgcatacaggattaatgttaaagagcagcctgatgttgttaagcagcagattatggagcatggtgctgttggtgcaagctatactcattattatgcaggagagaaccaccttaataattcatattatgatatgcagggaattgtaagttcaggtggtggacatgcagttatgattgtgggttgggacgatgattattccaaggataattttgcgacaactacaaagccttcaaataatggtgcatggcttataagaaacagctggggagattattttgattatttctggatgtcatatgaaacttattcgcttgcagatactgtttgggtatttgatatgtcagctgatgatggactggataataattatcagcttgatggcgggctgcatacagcaacagtaggatattatacaggtgcagctaatgtattttatgtatcagaaaaagaaggtgttgcatctgaaactcttaagtcagtatctttatcttttacacagacagcagatgttggatatacaattgatatatatactgaccttaaggatgccaccaacccgctaagcgggactaagcatgctgaggcgagtacaagtggaagaacaacttttgcaggaatacacactattcctctggaggaagaagtgattctcaatcctggaacttattatgcagttgttgtaaatattgataagaaggcatttgaagttgaatattcgtattcagagagcactaatccggggaaaactgatgataagatggtctgggaaaatgtagtaagctatgattctgactgtgaaggaagctattattataatggttatggcagatatggaaaatattattataacttctgtataaaagcatttacatcaaataatgttgatttgggtgatgtattagaaggatatacattaagcatggacggaaagattgatatgaatttctacatgaatcttcctgataaactggttaaggacagcagcacgtacatggaatttactatgcctgatggaaatgtgtcaaaggttatgttagccgatgcaagaaagacaaccgacggtttgtatgtgttctcttgcggaatagcagcaaagcagatggctgataaggtaaatgccagaattgtaagtaatggcgttaagggtgaagttcatacatactcagtaacagattatgctgaatatgtaattaatgctgcaagtggagtttattctgataaagctgtaaatgcagttaaagcaatgcttaattatggaacagctgcacagcagtattttggatataacacagataatcctgccaattctataatgacggatgatgataagaatatggatatggttggattcaatacatatacaggaaagctggttaatgcagacagtgtttcaggaataagctattatggaagttctcttgttcttgaatcagatacaatattaaggaattattttgagttgtcagacggatatagtattgataattatacattttatgtgaaggataaagatggaaacaagaatatcattgctccacaaaagacagatgcttcattatattatatagatatcagtaatgtgaaagcgtatgagcttgctgataatgttaatatatatgttcagaagaatggtgacagtgaagataaaataatgatgctggagtatggtgcatatgtttacgccagatatgttgataaatatttagataatacggccctaaagaatcttatgacagcaatgtatcattattgtaatgctgctacggaatatgcaaatatatattgatatttttaatatgtgactatataataactagcaaggctcattttgaaatgtgagctgattagcgtatttcagttggggaaagtatattttaatatgaagtattaatacacgacttgttatgaaaagtttaaaaaatagcggggagggtaagaccaattaacgtatgattaatgtaaacaaaaccaaagagagtattcagaatgttttaatatttattacagatgcaatagcgcttataatgtcttattacatgtctggttttatatggctgatggaaataagaaataatacattttcatatgtaatgaaagtgcttaatggcaatatagtcacaattattatagctgtattaatagctgctttattctgtaacattaaaggcgatgtacttaatcgtggcaaatttgaagaacttgcttctgttatgaagaaaagtcttatttcatcagctgttatagctgtttatgaacttttgagtaaaactgcacagggtgttccaagaagtgtgtatgtaattacattttttatgggaacagtgcttatgtttttattaaggatgcttgtcaaggtatatatgaagcatcgtaatggaggaaagcgtaccaatagtatacttgttatcactattaaaaacagggcggaagatacactttccaaagctgcggcaaggaatgactggatgcgtcgtatagatggtattgtaattactgatgaagatatgacaggtcagtcaatagagggatttcctgtagttgctaatgtacattcaatgatgcgttatattaagaacgagattgttgacgaagtgtttattgatgtggattacaagacccgcgaaagtatcaagcctatggttatggaacttgaggatatgggagtaattgttaatcttaagcttgagattcttgacagctataaggattttgacagtaagctgggttacataggagcagttcctgtcattacatttgctaacagaatatatgactggaagggaatgcttgttaagagatgcatagatattctcggagcaattgtaggacttatagttatgtttattgcaatgatttttgtaggtcctgctattatgatagaatcgccaggtccaatctttttcaaacagaaacgtgttgggaagaatggccgttattttgagatatataagttccgttctatgtatatggatgctgaagaacgaaagaaagatcttatggcacagaatgagatgagtggtcttatgtttaagatgaaagatgaccctcgtataactaaggttggcaagttcataagaaagacaagtattgatgagcttccacagttcattaatgttcttaagggagatatgagtcttgttggtacaagaccaccaacggtagcagagtttaagcaatatcaaggacatcataagagaaggctttctatgaaaccaggcatcacaggaatgtggcaggcttatggaagaaagacggttagcgattttgaagaaattgttaagatggatctgaattatattgataactggagcattatgcttgatattaagattttgtttaagacagttcagtcagtattaactactggtggacagtagaataattaccccctgtagtatcatcagatactgcagggggtaattgttttatctagacattatgtacattaatactggataattatagcagaattgcacaaaattcgttggcaatatagaaaatatacgtaaaaattaaccataatgcttattgacgcaaatcggcggttgggttaaaatgatagtaacttttggtataggggacatgctgtagtgcaacatgtcgaaaagaacatgttatatgctgttaataacaggaactttactatgcctacaatataataaggaggattttatgaaaaagggtaaaagaattttagccgcttttttagcagtgctgatggttgttgctattatgccatttacttcgtttagtggtatattcacaagcaaggcaaaggctgcagagagtggcaagaagtacacttttgagggtactgaacttgaggcagcagcggcaggaaagtatacagatggtcaggctgttactgcaggaactgatggatattttactttctatatgagtgcaaagactaagattgatggaagtgaaaagacttggtcagacggatatatatgtgctcagagagttaactttggtggcaaagcagatgttactaatatgaagaatcttgtttctttcaagacatctaatgcagcaaaggtaaaggtttactgggtagaaggtggaacagacaatcgtcagatggcaatctttggttctacaggagatgtagtaactaagacagaagtaacggcagcaaagaatgatccagtagtttctacattagaattagcagatgcaggaacatattaccttgggggtcttgagaataacaattatattttcaagattgaagttgaggagacagcagcagttgaagagccagttgttaaggaatacgaacttgatggtgctaagcttgagacggcagcagcaggaaagtttacagatggacagactgttgcagcaggaacagataatgcatttacactttacatgagtgcaaagactaagattgactcaagcagcaagacttgggatgacggatttgctggaacacagagaattaactttggcggtaaggctgatattgctaatatgaagaactttgtttctttcaagacagaaggaacagctaaggttaagatttactgggtagaaggtggaacagacaatcgtcagatggcaatctttaattctacaggagatgtagtaactaagacagaagtaacggcagcaaagaatgacccagtagtttctacattagaattagcagatgcaggaacatattatcttggaggacttgaaaataacaattatatcttcaaggtagttgttacagatacagttggtggtgatgcaccagttgttacaagaaaaaattggtcagaagttgctgcaccagtaattggagaagtggctcaggacggagcaaatgtaactgttccatttacaatggttcttggtaatgatggtgcagataaagtaagcgttgttatgacagatgcttcaggtaatacagaaacaaagggatatgcacttgaaggtgaaggcggaaaggtttcattctctccagcttcttcaggtgagtatatatttacaatcacagcttctagagagaatgaacaggataagactggtaatacagttaagcttaactttgcttatccactctcagcaccatctatcagcagtgcaacaagcatgggtaatggtacagtaagtcttgtatggcagtcagttaaggaagctacatcatacaatgtttatgttggcggaacaaaggttggttcaacatctgctacatcttatgatgttacaggattaactgttggtacaaagtatgattttgcagttgaagcagttagagagacaccagctgctgtatctgataagtcaacaatatctgcaacagcaacagctgaagctaagcaggtatggggatatatcgtatatggtaacggtgcaagcgagtctaattcagcatatgaaggaaacattaatgaaactggttcagttacattaagatctggagcagtagatgctaatggagttcttaagggaagcggtaataatggaaaattagttccagcatcattcgatggtcttaatttctattatacagcagtacctacatcacttaactttacattaagagctaaagtaactgtagatcagtggagtttatcaaacggtcaggaaggcttcggtcttatggcagcagacagacttggtggttctggatggaacaattcttatatggctgtagtttctaagacagaatattactggaatgaagaagctggtaaagttactaatgatacaacagcacttaaggtatctcagaagatcggtattgcttcacaggagaagaagggtcttactaaggataacattgcagcaatagaggctaatgatactgaaacagtaaaacagttccagagtgctatgtatcctcttgagcagagatatgcacagaatgtaaatgttattggtaatgctgttaaaccagttgatgcaacaatagagaatcctgttactgagatgtatcttacaattcagaagaataacacaggatattttgtatcatacgaatcagtagatggaacatattcaacaactaagaagtattatgacactgaaacattatcacagcttgattctgataatgtatatgtaggtttcttcacaagcagatatgcacaggcaacattctcagatgtaacatttacaacaattaacccatctgatgatgctccagcagaagagaagccaattgaagaattagtaactaatgcagcatttaattctaagactgcaacaggttcaagtgattatgaattcagattcacagctaactgtgatggtgttctttctatctgggatagtgagaataatgaaattgctacagatgtagctgttgcagctaatacagttgttaagcctgcaacaacaacacttaatgttggtaagaattcatttagatatgtatttacaccagatgctggctatattccagaaaaggatatggttatgtcatcatatgagcctattgaaggtacatttactgtaacatacagaacatatggcgttgaaggacagtcaatttatgtagcaccaggtaagtatggtgttggtactaaggaagatccaatgagcatctatgatgctgttaagtatgtacagccaggacagactattgttgttatggaaggtacatattaccttgataagacagttaaggttgagagaggtgttaatggtacagcagataagcctattcagatggtagctgatacagaagcttcttcaagaccagtatttgatttccagggattatgtgcaggtatggtacttgcaggtgattactggtacttccagggatttgatgtaactaattcagctaatgcacagaagggtatccagctttctggtaagtacaatacaatggataacattatgacttaccacaatggtaatacaggtcttcaggttagcagatatcttacaacagatgaatttgatatgtggccagcatataacttaattcttaactgtacatcatatggtaacgctgatgcaggttatgaagatgctgatggatttgcagctaagttaacagttggtgatggtaatgtatttgatggttgtatctcatacaacaacgctgatgatggatgggatctttttgctaaggttcagtcaggttcaattggcgctgtaacaattaagaattcagttgcttatggcaatggttaccttgaagatggtacaaatgctggtaacggtaatggatttaagcttggtggcgacagcatgtcaggcaagcatgttcttgagaactgcgtagcatttgataacaaggctaagggtattgattctaactcttgtccagatattaatgtaattaactgtacaacattcaataatgagtcttataatattgctctttatacaaattcagctaagaatacagatttctcagcaacaggtgtactttcatacagaacatatatgaaagataatgttgagcagtttaaattacttggaacacaggacaagacaaaggttgataacgatactaactacttctggaattatgaaggaacagctaagaattcagctaaaactgtaacagatgactggtttgaatcagttgatacagcaatggatcatgcaacacatgtatatgcatcacataaggtaacaagaaatgctgataacacaatcaacatgaatggtcttcttgtacttacagacaaggcagcagctaatacaggtgcaagaatgacaggtactccatcagctaagattgaaattcctgagggaattaagggacataagacaatatctataacaggtaaagatgttgttaagggtaatacaacagatgttgcagttattcagggaacatctacagatattgtgtggacaatcgatgcagatgcatctacatttgattatattatggttgatgatgtagttcttgatgcttctaagtacacagtagtagctaatggtaacacaacagttgttacattcaaggcttcttacattaagagcttaaaagcagcagagcatacattcagagcatgctttacagatggttatattgcagagactaagcttgaggttcttcctaagacaggtgatttctctagaaatatgatagctgtatatgcaggaattatgcttatggcattacttgcagcagctgtagttcttttcgaaaagaagagaaagagagtttagtgtaagcaaatagtataataaaacatatgaatgaggtctggttatccagacctcatttttgtatatagatatatgataattattgtacaattattacaaagtaatatctagttttaacgactttcagaaaaacatttactaaaagtgttattgactatttgttctattagatggtactattattacagatttatgaaaaggaaaaggaggcttttttcatgagaaaaagaactaaaagaatgttgtctgttcttatggcagctttaatggttgttagtattatgccggttaacggctctaataacattgttgctaaagcatcgacagcaagtgaagagtcttctgttgtgacatggtcagcagcagatattcttgcagcacaagaaggagactcaggattagtgttatgtggctcaggatgggctaataataatgctacagatgacaagacatttgaagacggttttagtgcattaggagacaatgccaaggcaggatctacaaaggcacagacagatggaaagacagcagcaggaacagtaccagataatggatgctatgtaaaatatacagcacctgttaatggtgaattagctattaatactaagataggaaagggaaagactttctatatagtagcggaagatggaactaaggtagcagaagcaaaaaatggaacttctggaagtacatataatactgttaaggcagaagtagaagctggaaagacatactatgcataccttggaggagcaacagctcagatctggcaggtatattttacacctgcagaagcacagtggttagctgcagacatattagcttcaacaacatataataatggtttaacattatgtggaacaggctgggctaataataatgccacagatgacaagacatttgatgatgggttcagtgcattgggtgataatgctaaggcaggttcagtaaaagcacagactaatggaaagacagcagcaggaacagtaccagataatggatgttatgtgaaatatacagcagcagctaatggagagttagcaattgatactaagataggaaagggaaagactttctatgtagtagcggaagatggaaccaaggcagcagaggtgaaaaattccacagatgcaagtacatataatactgttaaagctaaggtagaagccggtaagacatattatgcataccttggaggagcgacagctcagatctggaaagtatattattcacagttaaataagaagactgtagttgactgggaatcagtagcaaagccagttatcagtaaagtagaagcaggctcagatggctttactgttactgttgaaggaattgtggatgagtataatggggctgaagatattgttgtaacaatgcttcataatgatggacaggctggagaagctgttataaagagatcagaaggaacagcaacagttaattttacagctcatgaaagtggtgattatacatttgtagcaacagcacagagattaggttgtgctgataaagcttcagatgtttatgaagtaaaagattttgtactcggtgttaagatgccaactattacatgggctgaaaacaagggtaatggagaagtatatcttgactgggttaatataagtgatgcaaaggattatactttaacatataaggttaaaggttctgatgaaagcacagcagttaagattgatggaatcacagaaggtgattatacagttaagaatttaacagttggaagtacatatgtattcagtgttgttgcaaatagagcagatggatattgttcagctgtttcagaaaaagagttatcagtaactgcagatacacagaagaactggtatgtatcaactgttggttcagctcaggagactaaggcaactatcacagaggctgatggtaatgcacaggttataaatattgctaatggtgatacagcatctaagaaagttgctacagttgaagcaaaagatattacaaatacaaaaggaagtatggaaattcaggctaaagcttcaggaaagatttctgatgatgaagatggattctcatattactacactaaggttaatccagagaaagagaactttgaattaactgcaacatttacagtaacagatgcatctcttacccctgataatcagacaggttttggtgttgtagttgcagatacattaggtgttaataactggggtacaccaagttatgtacataaatattttaactacttttcatcaatgatgtacagctctaagattaatgcaccaacaatgcgttatatcacaggttatacatcagcagatacatctaacaaagatggtgtagacagagttaataataatgttaagtttaaccagttaacaggaacaaatatgttcaaggttggagctgagtatacatttacagtaagaaagactaatgatggatacgaagcagttgcaacaacagagaatggaacacagacacagaagcttacagctaatgattttacatcagtacaggaagatggaacagtagttgtaggtgttatggtagcaagaaagattggtgttaagattactgatatcaagtttactacatcagaaagtaagggacttgcaacatctgagatcgtagaagacaaggtaacaccatcaatcagagtatattcttctaacacatgtggagcaggtgagtatgaatacacggtagttcctaattgtgcaggaactttaaaggtaacaggaagtgctgacggtaaggctatttctaaggaagtaacagctgatgaggttgtaagaattccagttgcagttaatgttggaagcaatgctattaaggcagaatttgaaccagcagcggcagctaatattacatcaactaagacagtagcaagcgaaacaaatgttactcgtaaggtatatggtgaggctggacagacaattattgtaactccagatggtaagacaactggtgacggaactgaagaaagtccattagatattaatacagcagtttcatatgcacagccaggacagactattcttatgaagaatggtgtatatgataaatggattacaattaacagaagtgtatgcggaacagcagataagccaattaatcttgttgcagaatcaatctcaacagatggaactgatggtgttgtattgtcaggcgcaggtcttacaataatcggaagttattggcatgtatatggtttatatgtaaaggattcatcaggggtaggtattcaggtaagcggtaactataatacaatagatatgtgtacagtaaatcatgcggcaaacagcggtattcagataagcagaaatggtggagctgataactatgcaggaattcagggtaagttatggccaacaggaaatcttatcaagaactgtgagtcatttgataactgtgatgcaggaagaaatgatgcagatggatttgcagcaaaattaacatgtggtgaaggcaacagattctatggttgtatatcacataacaatattgatgatggctgggatctctatgctaagtcagtatctggtacaattggttcagttacaattgaaaactgtgtagcatacaacaatggatggcttacaacagatgatgtaactgcagcaggttataactatggtgaaggtaatggatttaagttaggtggtggataccttaagggtggacataagcttattaactgtgtttcatttggaaatcatgcaaagggaataacaagtaacagctgtcctgatatttctattacaagatgtacagcttacaacaacggtaatgcagattcatatagcgtaggtcttaatacaatggactctatgcttaaggagtggaaggttagcggtcttatatctatgtctaaggcagatttaactgctaaggcagaccttattcctttctcacagcatggagatgataactacatttataatggatcagaatcatacaataatcttggtcagaaggctacagatgagtggttcgagagtgtagatacaacaatcagaccatcaagaaatgcaaacggaacaattgatatgcataatctcttggttattaagagtggcgtattaagcgataatgttggtgcaagacttgatacaacaagtgaagaagcaataagcgttaagccacaggctggcgaagttgtatctcatgtatttgagtggacaacaactaaggaagcaacatgtacagaaaagggtgaaaagcatggaacatgtacaatatgtggacatgaagaaacaagagaaattgaagcccttggacatgaatttgccaatgagttcacagtagataaggaagctactactacagaagaaggctctaagtcacagcactgtttacatgcaggttgtacagagaagactaatgtaacagtcattcctaagcttacagcaggcagcgaagaggttaatccaacaccttcaacacctgataataaggatgatgcaaatgttccatcaacaggaacagattcatcagagaaagcacctgcagcacagacaggagatacaatgcatgcagtaccatttgcattggcaatgattatctctgcaggagtagttgttattgagatttctagaaagaagaaagcagtaagataataacagttaaacagataataataatggctggtgatatgagtgaatcatatcaccagccagttttttatataagcatttttatctgtaattctgcagagtaggtgttgaattaactccgagaggagttgttacaccagcagcggttgttactttgtaagtaatagtaatacctgcaccaggagcaattgagttgccaaacatatatgcaacatcaaggtcatggtaagtacctgtatacattcttccaccattgcttgcttttatatctgagattgttcctccggcaggagcaaatatatggatataaccagtgattgttccgccgtagcttccaagtatataatttccagcattaactttgtctgaattgcttaatacattgctataagttgcagttacatcataagttcttgtgccatcatcattaacaacaggttcgctgatttctgtgttgatatcgaggaaccagcccaatttgcatggatcagaaatgctgaaatatactcctgtttcaggattctcaggatcttcgttaagtccaccggaacagcctgcatttttaacaagttcctgttcttcctcatcttccatccacatcatgactgtacggtttttagcaccgtctgagaataccttataataatcaccagccttcttgacgtcaaaatcagatacaagctttgacatagtagctttggctgtttctgcaaataaatcatcaacataatctccagcagtagcagaagcatttgcattaagatacttgtaataaaggtcatactgcagaacctttgtagcattttcacttgttaattctgtaccatctgaaagtgttacattacctatatattcaagcattccctgaataatagcaggtgtgagagaaacaacaccattaacgtgttcggaattcttctgttcatatgcgagcgcccatatatacgcaactctttcaaaatctgggtcaaaacatgcatctcttggaccgttcatccatgagccgaaaagctctttttcttcggatgtgatattggcagcggaaggcgtatatgaagcgagaaccttgtatacactgctgaaatcaccaattgtaagtatcccatcacggatgcggattgtacctatagaaccagggaaaccgccagaagcacggatttctgatgaattctgtgcagcaagcagatatgttctgtcagagccgtctcctataaatgttttgaatagaggaaggaactctttgagattatcatatgaacctgtcattgaagcaatctgtacagaatagtctgcaatcatgctgttaagtcccattgggagatcaacctgattcattgctgtaactatatggtctatcttaggctcgatatcttcaagaagtgaaagatatgcgttgatagtggttatgctgaagccatcatcaactttaagtcctgaaagcggatagtcattaagtacagcaactgttggacgtgcaatatctgaggaagcttcctgaacgagatcaagaagttctttgacagaatcaatatatcctttgaatttagggattttgtaagctgtcttccatatttttttgtcaaatgttttattaatatcttcaattgctacatcaagctggtcacatgcagtttctgtggcaacagggtcctgtgctttaagtccagccataacatttttaaggtcagccttaagagtgtaagcctgttgtttaacatcagcgacctcgcgtttagcaatcttgtagccataagcaccgccaataccaatggcaatcagcagacatgcgacaatgctcaaagtaattataagtatgcgttttctgcgcttgcgctgcttagagtgtctatgtgaaccatgatgatgtgaactgtggcgtgattcatcagagtggtgatgcgaactgtgatgttctccatcagaatggtgatgtgaatgatgtgaaccagattctttagaatcagaatataaaatttcaaaatcttctgacatggaaacctccttttgtttggattattttgtaaatatgtgtatacaaacacaactccacattttaacagatgtttaaggtatttacaataatagccataatatcttataatattttaataaatttattaaagaaaaggatatcagatatgagtttacttacagtaaccggacttacacacggatttggtgacagagcgatatttaacaatgtgtctttccagcttaacaggcttgataagattggattagtgggagccaacggcgaaggtaaatccacatttatgaatataataacaggcaagcttatgcctgacgagggaaaggttgagtgggcaaagaatgtcagagttggatatcttgaccagcatgctgtgcttgagaagggcatgacaatccagtcggtgcttgcttctgcatttgattttctgtatgacatggagaatcagatgaatgagatatatgccgggcttggcgacgcatcaccagaagagatggataagctgatggcggaagcgggaactatccaggaccttcttacaatgcatgatttctatatgattgatgcgaaggttgaggaagttgcaagagcattgggattatctgaacttggacttgataaagatgtaactgagctttcaggtggacagagaactaaggtactgcttggcaagctgcttcttgaaaaaccggacatccttcttcttgatgagcctactaactatcttgataaggagcatattgagtggcttaagagatatctgcaggactatgagaacgcatttatactgatatcgcacgatattccattccttaacagtgttataaatgttatttatcatatggataatcaggaactgaaccgttatacgggtgattatgataatttccagaaggtgtatgctgtgaagaaggcgcagcttgaggcagcttacaataagcagcagcaggagattgcggagcttaaggatttcgttgcaagaaataaagcgcgagttgccacaagaaatatggcgatgtcaagacagaagaagcttgataatatggatattattgagttggcagcagagaagccaaagccagagtttaatttcaagacagcgagaacaccgggaagatatattttccagacacacgaccttgtaattggttatgatgagccgctttcaagtccgcttaacttagagatggagcgaggccagaagattgtgcttacaggtgctaacggtatcggaaaatctacattgctaaagagcatattaggacttattaagcctctgtcaggtgatgttgagcagggagattatcttgagataggatatttcgagcaggagactccagctggaattgaaactacatgtcttgaggagatatggcaggaatttccaggatatacacagtatgaggttcgttcagcccttgccaaatgtggtcttacaaccaagcatatcgagagcaaggttaaggttctttctggtggagagcaggcaaaggtgcgtctgtgcaagctgattaaccgtgagagtaacatccttgtacttgatgagcctactaaccaccttgatgtggacgctaaggatgaattaaaaagagcccttatggcatataagggcagtatacttatggtctgccacgaaccagagttctacgatggtcttgcgactgatgtgtgggactgcggaaagtggacaacacgtatttaatcattaaagtactcagggaacattttcctgattgcatcaatattttcagaatatctgctcatatgtctctgtgatatatgggcagctttttctttatctttcttctcgatggcggctacaagttctccatggtctttcaggattctacctgtttctttgcatctgaaacttaatattgtagttctgtcaaaatgtggtgccatgctttctacaaggttgtaccatacagttttgtcacacattttatacagacttccgtgaaattctttatcaagtgtgaaaattttttcttcatcaccgcgtttgatatacatttcccataaagctacattttcatataaggaatcaagctggttctttgtcagtatatcgcatgcttcaacagcaagctgcgcctcaagtacacagcgtaagtcgcggagctgttctacgatatctgtattgacatatgatacatatgcgccaatcttaggttttatctctatcagctttgactgtgcaagctctaattctgcctcgcgtaaaggattattgctgacatgcataagtgagcagagttcaggtgcttcaagcttctgacccggcagcaggttggtgtggacaatgttgtcaataagctgtctgagtacatagtctttagcagcttcatcttctgatttttctgtaatatttaacatatatacccccaaatgttaatgatatatattttatagcatatttttaaagaattgtctattttttaacacttgacattttataacatgatatatattatacagcgtgaaatatataacacacaatgtgatataaaagatacggaggttaaagatgagtggcacagaaacaaataataaaaagataactctcattcataagctggcatacggaagtggtaatatgctgggaagtggagctttggcaataagcggagcatggcttttatatttttacacgacattttgtaatatgtcggttgttaaagctacacttatattttcaattgcaacatatctcgatgtaattcttaatcctttgatgggatttattacagacagcttttacagaactaagctgggaaggaagttcggacgaagaagattctttattcttacaggtattccgcttatgcttctttatccaatgctctgggtaaagaatatgaattttttctattatcttacaacttatattctttttgaatttgtgtatacaagtattatgattccttatgatacacttgctgttgagatgacttcggattttaaccagagaacttatcttacaggattcaaggcaatgtttggaaagctggcaaacttcttaggcgcagctataccgggattcttcattggaatgcttggcaaggattcaccattgccattcttctacacaggtgttacatattgcgtaattatgattatttcgcttacattcctttactttaattcatgggagagaccttatgaagatgtagcagaggagaatattcctaatttcgttgagggaattaagaaacttttcattgatattgcatcaacattaagaatcaagactttcagacagcaccttggaatgtatctgtttggattcggtgcggaatggctttttacagcgtgctttacttattatatagtattctgtctgaaccagccttcaacacttgtttcagagcttaacagcttaagcagtatcctgcagcttatatcaacagctgtattcatcggtattgtagcaaagaagggatttgcaaaaccatttatcgcagcactttcagttgtaatcggcgcaatcctctgcttctttggaatatttgtattccatatagctcatattacagttcttgtatttggtgtaatggttatattcggtcttggaacaggtggagtttattacattccttggacagcgtatacatttatggcggatgttgatgaagtcgtaactaacagaagaagagaaggtgtatatgccggagctatgacaatggctggaaagcttatgagagcaagcgttgtctttatcttaggtcaggttcttgctgcatttggatttgtctcaggtgcatcaacacagccacagagcgcagtcaatgcgatagcaggtgtccttcttatcggtgttggtggacttgcaataattggaatagtcttctcatgcagaatgaaactcaaccacaagactcataagattgtaattgacgagcttgacagagtccatgctggtggcagaaaagaagatgtttctgaggaaacaagaaatgtaattgagaaattaacaggtatttcatatgacaaatgttttggtaacaataatattggttataaggaatgagaaattgaataataattgataggaaagcccatagaagcagattctatgggcttttgtgataaaaaatcatatcagcatcataatcagatataatccgacacatacggaattctatggaaaagtatgtcatccagatgttcaatagcttcatctgatgcctgtatcttgtccatgacgtgaagcttttcagcagtcttgtaaccaagcattaatgtagttaatgtgccgattgacatggatacttcgtaatcaggctgctgttcggtttcaatacattttccgctatcaaagaggtatgtaaaataaccattgttccatgcgagaaggtcatcttctatgtagaagcgtatgcatacagatggttcgtccgggtcgcaggcatatttggcaaagaactgtctgatatcaataattcgccccattgtgtatgggcggattgtctctttaatatcgctgtcatcaagttcaaatgcgattggctcactgtagtaattgtttccacggacctcgtcaatcattgaatcgtgggcatgtatgaattcccacaagccaagctgtgcctcgcggttaagataaatcatttctttcacatgcatgacatcagaacttatcatgtataccatatatccgtaaggtacatcgtccttagaataatagatggcaacagaggtgtcgtcctcgtcccagcgccagtattcttcccatgcaaggttgtttctatatagacagccatgtgtcttttcagcaaatttggtatgaagctctttaaattctttgtcgtcccatgaaactcgtctgacataaccaggctcattaagctttcttggaatctgtgtatccttgattgtataagtcatcttgttagagataatttcccagccaagaccacggtataatggaattgaatatggatacagcaaagcaaatgatttgtgagcatctctcattcgtataaggctctgaatcatcagtcttttcataattccatgtcctgtgtattcaggataagtacatacgcttgtaacgaaacctacactgtatttaacaccgtaaatgttcatatcaagtggatacactgcaaactgtgcaatcagatcatcaccattgaagcagccaagtacatcagctctttgaagaactgggaatttggactgggtaatctcatcatccttccagcctgtctcagcaagctcctgttctgttacctgaaaggcatatcttaagagtgcattgtattcttcagcgtcatctatagtaagaggacgcagtgtataattgttttcatcatttctgctcattgcgtttgttccttttctgtatgcgcgttttttgtacataatatagcactgggggcggttgtggtcaaatacggatgggcattatacttaataaaatatttatatatgata

SEQ ID NO: 8494 - DNA, 108339 bp, Unknown
  gut microbiota DNA sequence
attaatatttatattacatattataattaaattaaaattatgaaaagatatatatatttcaaaatagaaatatatatatcttttttatgtttcacgtgaaacataaaaaatacaattttttataacacattgtaataatgtgtgctataataaaaaagataaaaagttatttattaaataaaatgatatgagattatgtttcacgtgaaacatagaacatatggaataagagggtaatgtgggaagaataattgcaatagcaaatcagaaaggtggagttggtaagacaacaacagctataaatttggcggcatgccttgcagaagcaggacagaagattcttataatagatattgatccgcagggaaatacaacaagtggttttggattgcctaagacagacattgaaaaaacagtttatgaggtattattgggagaatgtaatattaaagatgcaatagtagaaaatataattgataatcttgatatacttccatctaatgtgaatcttgcaggtgcagagattgatttaattgacgtagataatagagagtatattttaaaagaaagtatattagaagtaagaaacagatatgattacattatacttgattgtcctccttcattaagcatgcttactgttaatgcaatgacggcagctgatactgtattggttccaattcaatgtgaatattatgcattagagggattaacacagcttatacatacgattaatcttgtaaagaaaaagcttaatccacagcttgaacttgaaggtgtagtatttacaatgtatgattcaagaacaaatctgtcattacaagtagtcgaaaatgttaaagataatcttaaacaaaatatttacaaaacaattataccaagaaatattcgtctggcagaagcaccaagtcacggactaccaataaatctatatgatccaaagtctactggtgcagaaagttacaggttattagcggaagaagtaatgggaagagaagaataaatataatggaggattgtaatagtatgccaacaaagaacactaaaacaagtaaatcaagaggattgggaaaaggaattggtaatctgtttcaggaagaagatactaatgatcagaaagtagttgttaaggaagtggtaaaagaggttgttaaagaagttccggttccggcagaaactaaattaaagatttctcagattgagcctaacaagaatcagccaagaaaagcatttgatgaggatgcacttatagaactttcagaatcaataaaacagtatggagtgttacagccacttcttgttaaaaagatggataaaaattatcagattatagctggtgaaagaagattcagagctgcaagacttgcgggtgttaaagaagtaccggttattattaaggactattcatcacaggaggttatggagatagctcttattgagaatatacagagagaagatcttaatccaatagaagaagcacttgcatatcagcagcttattaaagattatagattaaaacaggatgaagttgcagaaaaggtggcaaaatcaagaaccgcaattacaaattcgttgagattattaaagctggatgaaagagttcaggaaatggtaatcgaaggaaaattaagtagtggtcatgcaagagcaattattagtattgaagataaagaaaaacaatacatggttgcacagaagatatttgacgaaaaactcaatgtgcgagatgttgaaaaacttgttaaaaatattgataagttagataaatctgtggaaaagacaaagccagaaaatgattttgtatatagagattttgaagaaaaattgaagataatcatgggtacacaagtagttatcaaaaataagaataataacaagggtaaaattgaaattcagtattattcacaggcagagcttgaaagaatatatgatatgttaaagaaaattaatgaataattaagtttatatataatgtatactatataactaatttgataatatattaataagctaatatacagaaaggaaaaattatgttagatgtatttggattatttaaagtggacacactttatgtagttataggtctgcttgtaataacaattgcagcaatagttcttgcaattgttgcaatatgcaaggcttgtgctatgacgaaaaagtatgagatgatgatggaaggctctgatggaaagagcatggagaaaatggtcagaaaatataccgatgacattatcaatcttcagaagacaagtgaagataatacagaagctattaaggacatatatgaaaagatgcagcttacattccagaaggttggtgttaataagtatgatgcattccatgaaatgggtggaaagttaagctttgcgctatgtatgcttgataagaaagacaatggatacgttgtaaatgtaatgcacagtaatgatggctgttttgcttatattaaggaaatagttaatggaaagtcttatattgaacttggtaaagaagaggagaaagctgttaagcaggcactggctggacgtatgggagacgaagaattaagtaaagaaattaacgatttaatgcagaaagacaaaatgtaattgaaaatatacagaaaaaggtgcataatagcatttggtaaatttgataaaatagtgtcaatgataggacacggaaatgaggagtaatgttagatttaaaatttgtcagagaaaacccggatattgtaaaacagaatattaagaataaatttcaggacagaaagcttccacttgtagatgaagtaattgagcttgatgctaaagctcgtgcaacacagacagaagctgatgaattaagagcaaacaggaacaagctttctaagcagataggtgctcttatggcacagggaaagaaggaagaggcagaggcagttaaggcacaggtaagtgcagatgcagcaaagcttgctgaattagaggcttctgaaaaggaacttaatgaaaaggttaataagattatgatgactattcctaacatcatagatcctagtgtaccaatcggaaaagatgacagcgagaatgttgaaattgagaagtttggtgagcctgtagttcctgattttgaagtaccatatcatacagatattatggaaagattcaacggaatcgatatggatgcagctggtaaggttgctggtaatggtttttattaccttatgggagatattgcaagacttcattcagcaattatctcatatgcaagagatttcatgattgacagaggattcacatactgtattcctccttatatgataagaagtaatgtagttaccggtgttatgagctttgatgaaatggatgccatgatgtataagatagaaggtgaagatctttaccttattggaacaagcgaacattcaatgattggtaagtttattgacacaattacaccagaggaagagcttcctaagacacttacaagctattctccatgttttagaaaggagaagggtgcacatggtatcgaggaaagaggtgtatatagaatccaccagttcgagaagcaggaaatgattgttgtatgcaaaccagaagatagcaagatgtggtttgataaattatggcagaatacagtagatttcttcagaacaatggatattcctgtaagaacacttgagtgctgttcaggagatttagctgaccttaaggttaagtctattgatgttgaagcatggtcaccaagacagaagaagtactttgaggttggttcatgttctaacttaggagatgctcaggcaagaagacttaagataagagttcagggtaaggacaagaacaagtactttgcacatacacttaacaacacatgtgttgcacctccaagaatgcttattgctttccttgagaataaccttcaggcagatggaagagttcttattccagaagctcttcgtatgtacatgggtggtaagacagaattagtaccagttaagtaatatgaatactaaatagatattattaaaaatgtggataaaacatattaaatgaatatgttttatccacatttttttaatgttatccacaaattttgtggataagtgtgttaattctgtgggaaatccattaaaatgctgttaaaaaccagtattttaatgtggaaaaccttgtttatattggtatgtggaaaacttttactggaaatctacaacatttatccactgattaagaagttctttttcttcttctttattcttagtaagtcttgctgctgcaactaatggaagccattcattaacatatgaacgttttgtgttagttaattcacagaaagcacttatgtacttttcaggaatatcactcttgtcaccaaactgtaatttgagaagtaaaaatgtattcgcaatatcggcagatgcattaccctgtgtagcatgtacccagtcaactgctgtgatttctttgatatttcccttggcatcagcagtaacaataatattatcaggacaataatctccgtgacaaagcttagtatgattcttcatggaattaagtcttgtaagaagttcatacttaacgctgttatcaagttcttcaatagagttaatctggcggttcattttatcctttaataccagaagaagtgggttagacttcttctggaaagatatctggtattcaaccattttcttaatataatcatcagccttgtcagggtatttttcaattaattgtgtaagagtaggaccttcaacatattcacttgtgatagaccatttaccgtcagtaacagcaacctctaaaagctttggaatattaacgcctgcgtcttcaactctagaagtattaagagcttcatataaaacatctgatttgttgtaggtcttggcaaagaccttagtagctttgccattctctacatatactgattttaacttagattttgctaaatattttttcatatgacatgtcttcctttcttaaaataataatgatgattatttaccatagtaagcctttaagtacatggctttcatttcactcataagaggatatcttgggttagcaccagtacactggtcatcaaatgcagcttctgtcatctcatcaagagttgcaaggaagtcttcctctttaacaccataatctgcaatagttttcttaattcctacctttgcctttaattcttcaatagccttgatgaggttttcaaatttctcatcatcatctttaccctgaattccaaggaagtcagcacattctacataacgtgctttgcaatgtggatactggtactgtgagaatgttcccatttttgttggaacctctgcagcattgaatctcattacatcagtgataagaagggcattagcaattccgtgtggaaggtggtgatatgcacccagtttatgtgcaagtgagtggcacactccaaggaaagcattagcaaaagccataccagccatagtagaagctgttgccatcttttctcttgcaactgcatcatgtgcacctaattcataagctgctggaagatattcaaatatattcttcatagcctgtaatgcaagaccatctgtatattctgttgccataatggaagcgtatgcttcaagtgcatgtgtaagtgcatcaataccagaagctgctgtaagtcccttaggctgattcatatgcatgtcagcatcgataatagccatcttaggaagtaattcatagtcagcaagtggatatttctgaccagttgtttcatcagtaataactgcaaaaggagttacctctgaacctgttccagaagatgttgagatagcgacaaagtaagctttctcacccatcttagggaatgtgtatattctctttctgatatccatgaaacgcatagccatatcaaggaagtctgcctcaggatgttcgtacataacccacataatcttggcagcatccattgcagaaccaccaccaattgcgatgattacatcaggttcgaaaagtctcatagctgctgtaccttctttagcacatgcaagtgttggatctggtgctacattatagaaagtagtatgcatgattcctaaagaatctaacttatctgtgacacatttggtataaccattcttataaaggaactggtcagtaacgataaatgctttcttcttacccattacagttccaagttcatcaagggcaacaggtaagcagcccttcttaaagtaaaccttctcaggtgctctaaaccaaagcatattctctctcctctcagcgacagtttttacattaagcagatgctttactccaacgttctcagatactgagtttccgccccaagagccgcatccaagtgtaagagaaggagccatcttaaagttgtagaggtcaccgattccaccgtgagatgaaggtgtattgataaggcagcggcatgtcttcattctttcagagaattcagcaatcttgtctgcctgtgtttcaacattaatataaagagatgatgtatgaccaaatccaccatctgcaatcaggtgttcagcttttgaaagagcatcttcaaaatcttctgccttgtacattgcaaggacaggtgataacttttcatgagcaaattcttctgagaggtctacagatgttacttcaccgataagaattttagtttcttcaggaacagtaacgcctgctaaagcagcaatagtatgggctttctgaccaacaatcttcgcattaagggcaccgttgataataatagtctttcttaccttttctgtctcgctcttattaaggaagtagcaacctctgtatgcaaattcttctttaacagccttgtaaaccttcttgtcaacaattacagactgttcagaagcacatatcataccattgtcaaatgtcttagaatgaataattgagttaacagcaagtattacatctgctgattcatcgatgatagcaggagtattaccagcacctacaccaagtgcaggctttccagaagagtaagcagctttaaccattccaggtccgccggtagctaagataatatctgcttccttcataagtgtatctgtaagctcaagggaaggaacatctatccagccaatgattccctcaggggcacctgctgcaacagcagcttcaagaacaaccttagctgctgcaattgtcgatttcttagctcgtggatgtgggcttatgataataccatttctagtcttaagtgaaataagagttttgaaaatagctgttgaagttggattagttgttgggattacggctgcaacaactccaataggttcagcaacctttttaattccatatgccttatcctcttcaataacaccacaagtcttagtatctctgtaagcattataaatgtattcagaggcataatgattcttgataaccttatcttctacaattcccataccagtttcttcaactgcaagcttggcaagaggaattcttgctttattggcagcaagtgcagcagcagtaaatatcttatctacctgttcctgagtataagctgcgaagatgcgttgagcctcccgtacaccggcaagcctttcttcaagagcttcgactgtgtcaacaattgggtaattctcagttaaattctttgacataacatttcctccataacttgattcgtgcaatattgattgataataatttaacaatgtcaatataacactaatataattataagtcaatattcattgtaatattaattaaaatatgctatcttttacctagtaactgggggactaataaatcttttgttaaggatggagcggcttatgaaacaggttagtgttgataatcttaaagaaaacgatatattagcttttcctatattgtcgcattcggggactgttcttattcatgcggatgttgctctgacagatgaacttattgaaagagcaattaatcttggagtaagaactgtatacataaaagacgaaaaagagggaattgtcagggagaatacttctgatagtgatacggcacgggaagaggaagaatatccatacagacttgaagaaactgccaataattcaaggcagatagtaaaaaaaatattagaaaaacacatttataaacataatgaagaacttaagataattgttaatgaggcacagagaatacttgatacagttattgcagagccggaggttgtgaataatattactgaaatcaggaatgtaagtactgacatgtatacacactgtattaatgtatgtactttgtcaacaattatggcattaaggcttaaaatgagtaataaacagatacataatattgcgatgggagcaatacttcatgatataggactcagatatattaatgttccttatgttaatgttagtgagaataagatgactaataaagatgctgttgaatataagaagcatactatatttggatacagctcactgcaggacgaggaatggcttcctgacgtggcaaaggagattattctctttcaccatgaaagaattgatggctcaggatatcctttccagcataagggtgacaggcttaaaccagaagttaagcttgtttctatctgtgatgattttgacagtatgataagtggcataggcagtgagaagatgaagatatatgaagctattgaatacatcaaagtgcattcgggagtaaaatatgaccctacaattgcttcaaaattcttagactcagttgctgcataccctgtcggctgtacagtttacacaagtgatggcgaaaaagctgtagttataagacagaataaggaagctgcagacagacctgttataagaatgacagagcatgcagatggaacaccttatactgaaaatgtagagtataacttattaaagcagcttactatgtttatagtagatacagaatagagcattggagcagctatgaatttatatataagaacccttggatttgataatatgacatcagaggctgaggcaaaatttataaaaacaggaattagagaaagcataaaagaaggatttgtgatacgccacgagaaattagatcgtggcgttattatcttgcgccttagcaactcaaccggattgtatgtgtatggaagatatgaaaagaatatttttaaatatgagtactattttccgtttgttgtggggaaggctttaagtgacaatgaggagatgactattgagagacatcttgacaaggaatcctatgcagttatatgtgatgaattaaagacaggagtaacgcttatattttatcttcagaatgtaatggattatcttgattatctgtacagtggtaaggattttaatgcggatgattttaatcctgacagaaagaacgaaattggtaaagtaccaatcagaaacaaaaaggtggcacttacaggactgtcgcttggtggaattattatgcttccagtgagaaaggaaagaaattctaagaaaagcagacaggatgaaattgcaagaaagaatcttattcaggcagcaaagaatggcgatgaggatgcaattgagagccttacaattgaagatattgatacatacaatgaactttctaaccgtgtcatgaaggaagatatatttactatagtagactcaacatttatgccatgcggtgtagaatgtgaccagtattctgtcataggagagattcttgaactgcgtgaagaggagaatatatacactggtgagaagatatatattatggttcttgaatgtaacagtcttattataactacagcagttaataaggaacatctgcttggagaaccagccgtaggccgcagattcaaaggacagatatggcttcagggaaatgttagatttactgactgatattgttgttaaatatatgctttcataataaaatgtatttaatatagaaatttacatattattacaaatgtggtattataatacaaggcatataagaaatcggaaatgtcaactaaatattattaattatcaacgaggagggaaagctatgaagtttttcagaaaattaggctttcagcttgttttatttttcgttgttgccattacaattcctattgtaatgcttatggtaagttcaattacaacaacttcgtcttcaatggaaaataacatgaaggtaacaagtgagcagactttgaatgaagcacagaatcagtttactacatatcttaagactctgtcgcagccggtagacctgcttacaagaaagaatgaagtaaagcatcttgaggatcagggaacattaagtgataatgttaaggcagtaagagattctcttattgcatcagttaaggttactaatggtgcagaaagagcgttctttgctactaatactaatcttgaggttacaggttggggagaatataacccagagactggtaagacacttagtaagggtggtcttgagaatggtgtagacagaactaaggaagtatggtacacagattgtaaaggtcttaaggcaagaaacagcatttatgcttatttttcaaagccatattacagcaaggattttgataagacaataattactgtttcacaggaaattaagcattcagacggaacgaattatggtactgtgggtatgcatattgatttttctgagattactgattttgtacagggtatcggacttcttaatacaggatttgttgtacttgcagatgaagatggtaatatacttgttaataatgataataacaagtatgtaacagattcagtatcaggactgaattgctggagtacagttaaaggtcttacagaggatgattatgataaagcattttcatttgatgaaaacattaatggtgaaaaggtacatgtagtaacatctaaggatgctgttacaggatggacacttgttggttttatcagttctaaagaaacatctgctacaactaataagatgattagcaatactgttatattcagtattatagcatttgttattggaattggtattgcactttcagttacagcttctatgactaaggagattaagaaggtttctggccatatgaaggatgttgccagtggtgatttaacagacagaattgatgtaaagaagaagaatgagtttggagaccttgagaataactttaacaacatggttgagaacatggcagttcttattaagggcgttgaggaaaagagtggagttatagtagatgcatcggctaagattgcaggagtatctaagtctactacagagacagtaggtcaggtttcagaggctatacagagtgttgcagttggtgcatcaggtcaggcagacagtacacagacagcaacacaggaagtagagaatcttgcagacagattaaaggaaactaaggcttatgtaactgatatcagtgagatgtctgttgaaacacagaagttaagtaataagggacttacaattgttgatgaacttattactaagggacagcgttcaattgataactctaagatttctaaagcagttgtatctgagatggtaagcagtatagagaagattaattttatatcagatgccattacagaaattacagagcagactaacctgttatcacttaatgcttctattgaggcagcaagagcaggagagagcggtaagggattcgcagtagttgctgatgagataagaaagcttgctgaacagtcacagcagtcaactgacgagattaaacagattgttaatgagattactattaagtcacagcaggttgagcagacaatggatgagtcagttggtattatagaggaacagaatgtttctattaaggatgctaaggaactgtttaatacaatttctgattcagttaacggacttaaggaaggtcttgataatattacacagctcaatgaagctatggatactaatagaaataatgttgtaagcaagatggaagatgttgcagcagtagcaactgagactgccgcagcctctgaagaggttacagcatcagccgttgatgttgagcagacaatgcacgaccttaacgaatttacagttgaacttgataatattgcagaggctcttaaggaggcaattgataagttcaagttacaataattaaactaatccgataaatgtgtttatggaagctgccactctggcgattgtaatcgccgggtggcagtttctttttaatctcagggtatcattgaccttgctgatgttttgtgataaaatctctctaggtgtttagccaagttgttctcatagttaagtggatataacggggacctcctaagtctcaatccccagttcgactctgggtgggaacatttatattaagaagtgacaagcagtggcggtgggaatcgttgctgcttttttatgtcaggagtgttgcatagtaatattttagtagaaatgaaatttattatgcaggcaattgtaaaaactttatttgattttgtggatttaatcacagtaagtaatgttgttgtaatgtctgagtaatgacatataatgtttcggagccttatcttactttaaaatagatggaaaagcctgtgaatttccgtccataatgtgttagtaatgttgttgtaatgtttagtaatgtttgatatagttatgtcaagaacattgttaatggaggagattcatgaaaatcagagagctatatccagatgttattacagaagatacaagttatgaatataaagcgatattaaatccggataatcccattaaatgggcaaaaactcttattggatatgcaaatgataagggaggaaccttatttataggtgtatcaaacggtggagaggcttttggaattgatcttgaagaagttgataaaacaaaactattaatttcaaggattaatgatagacatatttttccacacattaagatttcatatatgatgagaagtgtggattctaatgcggaacattttgtattagctgttaaagttgctcctgcagattctgtaataagatatagagaaggagattacaatgaaacagtttttataaagggagatggaaatgcgactcctgcaacgccggaagaaattatttcactttcaaagagaaaatatggtgtagataatgagacaagcgaggtggcatatactgataatcagtggtcagtataccttaatctttgtaaggaatacagacaagataaatctgctccaacaatgaaagaattgcagaacgaagaaatagtttcaaaagatgggtatgcaaaatcaggatttataatgttttcagacaactataatgaagatgacacaatgatatgctgtcgtttgtggaaaggtaagaacaagacaggggttgttttagatagcagcagattcaggggttctattgcaaatgtttttgaaaatgcgttgaactttattgaacgaaacaccaaaacaggatggataaaaacagaaaatggcggacgggatgaaatcagatcgtatcctaaggaagctgtaagagaggcattggtaaatgccattgcccatagggattattctatttcaggaacacagattgatgttgatatctactcagacagaattgaaatagtttcaccggggtcatggttactgccgaaagattacaatgcatatccagcggggtcaataccgtctatcaggagaaattccattatagcagcttgtttggatgtggcaaatctgatggagagaggtggaaccggttttcaaaccatgattgaagcttacaaatcatgtcctgaagaaattcagccagtagtatctatatatcctggatttttgaatttgaaattatttgacagattatatagggatgaagttatagaacttgatttggaaggacttactgatggagaaaaaattatggctattcttaagatggaaggaccaaagccaattaaggaactacagctgtctcttaactaccgaagcagaagccaattcttaaatgaggttataaatcctcttatgaaatcaggggagatatatagggatggcaagccaaaatcaccaacggcacttattaaaatcaaaagataaaagtaaaatataatttggtcaaaaaccatcgacatgggtgggaacatttatattaagaagtgacaagcagtggtgattcgcaagaaataggatagtatatagagtaaggggtataacatgaaaagggaacaggggatattaattggcacagtaatagctgcgattattatgatgtttttatgtagtgttttcacatttagtgatgcagtttctgaaaaagctttgacaacttgcattccagaatcagtaagtataacagaggatggaaaaacacaatatgattttaatttaaaatcatatggacaggatataggttcaatagtattttattcttcacaccagagaataaatgtatatgcacaaggagaacaaatttacagacttagtaataaacgaagtatatggggaaataccccgggatggacatggaattttgtaaagcttccatctgatgtggacagccttcaaatagagatttcaccttgttataaggaggttgaaggtcagaaacaggaattctatatcggtggtggcaatgatatatatatgaaattgcttcgaaaagctatgccggcatttattataagcgtagttattttattggtaggattatatattactatatattggacaattgtacataaggggagtcagatagacggaacattgttatatctgggaatattttcgattcttcttggattatggtcagcaaatgaaacagatgtgtcagcacttatatttgcaaatagacaagccggggcatacattgcttttgttacacttatgattatgccaatggcatttattatgtttgtaaaaagttttttggaaataaatgataatctgttttggaaattaatctgttattttaatgtaacaattattcttttagaacacatacttaatgctacaggaatgtattattttagacagacattgtggatgactcatattgtaattatattaatgctgatatatttatttgttgtaattacaattaagattattagaagacagttggacactaggtataaatactgtatattagcgttgattttagtatttttgtcgacaatcatagatatggcaggatattataaaaatggtaatgattcaggagtatttggaagaatagcatttcttttatttattcttgtacttggattagaggcttcaagacaggctgttgcgagactaaaaaaggggagaaggatagaggaactcgagcagtttgctttaaatgattccatgacaggtatgtataatagaaatgcatatgattattatattaataatgaaaaatgctttgatgattgtatggttgtaacgtttgatttaaacaatctcaaaaattgtaatgataactacggacatagagctggagatgcttatattattaatgcagcacgaataatagaaaatacatttgaacgttatggtaagtgttacagaattggcggagatgagttttgttgtataataccaaagggaaagagtgtagatatagagcgagtaataagaaagctttatcatgatgtagatgttttgaacaacaagagaattattccaacagaagtgggaattgcctgtggttatgctgtttttaaagttgatgatacggagctggaaaaagtccgggagcgtgcagatgaggagatgtatcagcgaaaaaaagagatgaaaatgtgattaataactcaaaaattaatatcttataaaatattatcgacatacgcctatatacacgctataatatgtttgcttttatatgtagatatcacgagattagaataagtaacagaggaaaatgtttatgaattatattgttatggatcttgagtggaatcagagtgccaagggaaaacaattttctgaggatcattttccttttgagattatacagataggtgcggcgaaggttaatgagaagcttgatattgtggatgagtggcagtgtaccattaagccacaggtgtatacaaagctgcagaatacagtcaagaagatattagggataacagaaaatgaccttgctaacggaacggatttcgtatcgggtgtaactgaatttcttgaatggtgcggggaagattatacatttgttacatggggaagcatggatattactgaattaagacgaaatatgaagttttatgatgttccggagaatttcccaaagccgcttctgtatcttgatcttcagaaactttacagtattaatttttcagatggcaagacacgcatgaatcttaaatctgcaatcgatgagcagggaatcaagggtgatgagcattatcattcagcaatgagtgatgcaaggtacacagccaagataatgaagaagctggattttgacagagttaagaagttctgtagtatagacacatttacaattccagagtcaagaaaggacgaggtatatcttaactttggaacttatgagaagtatatttcaaagggatttgcgacaagggacaaggctgcaagcgacagaaatgtacgttcctgcaaatgttttttatgtggcaggactatgacaagaacggttaagtggtttgctactaattcgaaatgctattacggcttgtttacgtgtgatgaacatggacttataaaggggcgtttcagagttaaacagaccgaagaaggcagatattatgcagtcagaattatgaagcacactgatgaaaagggtgcacttaagatatatgaaaagcagataaaagagagagagcacagacgcaggcggcgtcaggctgagaaactctcagaacagaaataatggcatgtcagaaattcaactgacatgccattttaatatatttaatatcagaacattaatccatatattactgcaagaccaagaattacctggataattgtgaatctgaaaacaacctgtgtatctgaccagtctttattctttctcatatggtcgtggattggtgtacgaaggttcttcattaggttgatgtgaagaaatctcatgaaagaaaccttgataagaccaagtccgccatcaagaataattacaagtgccattggaatataaagcagcggtgcatggagcttgaggaatgtaaatgctataaatattcctattgctctagaacccgcgtcacccataagaagcttgcttggtgatgcattgaaccacaggtagccgaggatacacacaatcataataagaacggtgtgtctgtaagctgattcaatattaaatgacttaaaaagtacatacactgaagcaagtgttacaactgaaagtgtaccgcataagccgtcaacaccatctgagcagttagtaacattgatacttacccatataagtataataataagtattgcatagataattggattaagagttactgtctttccaaagaatgcaaggtcaaatgtgttagggttgtaatgcaggtaagtaactgccgccataactgatattgcaaggtcaataagacctttctttaaattaccccatggtgatgaagcactgtcatcaaggtatccgctgagcattgcggcaagcacaagtataagataaatgataagctcggcacttaagtttacgaataatgcacatgtgactgtgaatgtaagaatgaaaatcatgccggcgcctcttggctttccaactgatttacttccgttaatggcataagctcttccggcatctcttggaagaagattcttgccaagagcaattgcagctattgtaaatgcgaaagcaaacaggatgctgacaaatgctattatgttagtgaaactttcgttaacaatatagtatatcataagaatttaatactccttttcatctttctaacttatataaagcatttatttcaatgcgatttacagtataacataatatatgtgaaatgaacattttttttgctaatgaaatgtagtaattaatttgctaatgtggtaatatactattaattagtgggatatctgaggggacccataagtgtcgtgtaggataataataatataatggaggattttatgaagaatatgcaaaaatacgagcagctggcaatcacagaactggatgcatatctttttggacagggaactcattatgagatatataacaaaatgggtgcgcatgttggagtaaaagacggaaaagaaggtgtgtattttgctgtgtgggcacctgctgcaagagaagtctatgttataggtgagtttaataactggaatgcatatggttatgatatgaagaagatttcagatggtggaatatatgatttgttcataccgggagctaaagcaggggatatgtataagttccttattatttcccagagtggagaggctctttacaaggcagatccatatgctaatcaggcacagttaagaccagagacagcatcaatagttgctgatctttcaggttatgaatggaaagattctgaatgggttgagaagaagaagacagagaatcatcttaaagcacctctttctatatatgaatgtcatcttggctcatggaagaagaaagatgatggaacagaggacggattttatacatatagagaattggcacctgagcttgcaaaatatgtttcagatatgggatatacacatattgaacttatgggaattgcagagtatccatatgatggatcatggggatatcaggtaacaggttattatgcacctacagcaagatacggaacacctaaggatttcatgtattttgtagattatatgcatgaaaaaggaattggtgtaattcttgactgggtaccggcacattttccaaaggatgcacatggacttgctaatttcgatggaagctgtgtatatgagtatgcagaccctagaaagggagagcatcctgactggggaacgaaggtatttgattattccaagaatgaagtggctaacttccttattgccaatggaatgttctgggtggacaagttccatattgatggtttaagagttgatgctgttgcttcaatgctgtatctggattacggaaggacagaaggaaactgggttcctaacaaatatggtgacaacggtaatctcgaagcaatcagctttttaaagcattttaacagcatgttaaagaagagattcccacaggcaataactatagctgaggagtcaacagcatggcctatggtaagtggtgatcctgacaatggggaatgtcttggctttacatttaagtggaatatgggctggatgcatgatttccttgaatatatgaagcttgatccatatttcagaaagtttaatcatagcaagatgacattttcattgatgtatgcttacagcgagaatttcattcttgtgctttcacatgatgaggttgtacatcttaagtgttctatgcttggtaaaatgcctggtgacagggaggacaagttcaagaatcttaagctggcatatgcatatatgtgtggacatcctggcaagaagcttttattcatgggacaggaatttggtcagtggaatgagtggagtgagaagcgtgctcttgactggtatctgttagaggatgaaagtcatacagaacttaaggattttacgaagaagtgtctgaagcttaataagaattatccatgtctgtatgctactgattacagcagtgaaggattcagatggattaatgccaatgataaagataatagcgttttatcatttatgagaatcagtccggatggaaagaagaatcttctctttgtacttaattttacaccagttgaaagagacagcttcagaataggagttccgttcaagactaagtataagctggttcttggagataatgaagctgaccagaagaagactcttacagccgttaagggagattgtgatggatatccgcagtcattgcttattgacttacataagtatggaatagctgtgtatgagtttaacggtgatgtttctaaggttcatgctacgaagatataggacaataatatagagaaagggagctggtttggattttcattaattctgaatcagcttcctttttatttgttgccactaatctctcaattatcccgctatatctgccgaaatatttattatatgacaatgagtgattgtttcagatagtaaataagaaaggcagcagaatatgacatatacagtttcaggcgcgaattttaataaagatgttgcggcacagggaacatctattaattataaagaaaataaggcggttaaaagtgaaggtgtggcaggctcatttgcaggagtggtaatctctggcagtgtgacagctgcaaatgacaatacatatgagggacttcttaaggaggcagatgatgtaaagagccagattatggcgagtgcttccagtgcaaagataagccttaaggcattgatgatgaagttatcaggtgctgatgcggtaaagctagatgaggacggatttaatcttacagatgctacaccagatgatatggttaatattattgagaaaattaagattgaacttgcgatgcactctgatgattatgttaattatggcacagcagtttccaaggataagattgagagtgtgactggaagtgcagcaacagcggcaagtgtcgagagccgtatgcagggagcagatatagctgtcaatgatgaaagtgttgctgaggttaaaggcacacttgaaaagagtaaagagttaaagccattatcagagaacacaaagaattacatggttgctaatcgcatagagccttcaattgctggaatatatcaggcacaggcggcaacctcatcaagtatcagtgcggatggcgttacaataggaaagtgcgcagatgcaatatctgacgctgattttgaagctttaaggccgggaattgagaagataattgcttcgtcaggtcttgaggttaatgataatacacttgcggatgcaagagcatttattaatgcacagattcctgttactaaagaaaatcttgaatataaggcacagcttgatgcgatagatattgaaaagattcaggctgaccctgatgaaatgcttaataagatacttgataacatgaagcttggaggcaaggcagagaatacgctcgttacaggttcgccaattgatgatataagaacagctcttgatactattaacagggcagagtattcagatgttgcaaatgtggtatcaaaaggggaaacatttacaatagcaagccttaagctggagatggatgcaagaagcttcagaattgaatacagtgcagcaacagtaagcacaggaaatagtgaagttagaaatcaggcatctgatgtacagcaggcagcagataaggcgtacgacacgcttgtaacagcaagggttcttatgagtgcgaatgcgtccatatatctcgttaagaataacatttctattcttacaactccgatagatgagcttaattcaatgcttatggaatatgaacaggcggatgaaatgtatgaagaagcgcagattgcatatacagatgttcttgaagcaagaaagacattgaatgagatagtaagaaatcctgcgcgtgtatttgccagtatgtttgacaagatgaatgaaacttatgaggcagtcggaactcagataagaggcgatttaggtgattcattaaagaaggcagtacagggaagtgcggatgatattattagggagcttggacttgagggaactgatgaggacaaggaagcaataaaggtactggctgctaataacatggatatgacaaaggaaaatgtagagatagtcaaatctgttaatgcaatgattaataatcttattaagaatatgaaaccagagacagttcttaatatgataaaagacggagtaaatccaatgaatgcttcaattgaggaagtcaacgaatatcttacagaggctaatgataaagcatctaaggataatgaggagaagttttcaaagtttctttataagcttgaccgtaccaatggtattactaaagagcagagaaagcagtttataggaatataccagatgatgaatatattcaccagagatgccggagtggcagcaggtgcgctgattaagcagggagctgaggtcactatgaataatcttatgactgcatataattcaagaaagcattatgacatggacgctgttattgatgagaatacaggaatggcagaggtaagcggaattgctaactattacagtgcattatttatggcaaatggtggattagttaccccgaatacattaaagaatgtggataactcatccggaatcggagaacagtccgttgaaatgtttattgaacagttagaggataactatgatgcggcagccgaggaacaatattatgaggaatatcttaaggaacagcaggcagcagtgcaggcaggagctgatatattgaggcagataagaaatgcagatacagaaataaacagtggtaacatacaggctgttaaagcatttttagaatccggacagttcccggatatcagaggtgttaagacaacacgtgattatgcaagggattcgattgaaaaaatcggacataaagaaaaactgtcacttatgtatgaagaaatgaaagatgagacagaggaagaacttcaggaggttctttccaaagcaggagaccttgatacacagatagatgtcaattacgagggatttctggatttaagacttaaggacagaacaatcggatatattaagaatctggcattaaggcatgattacagaataccgtatataacagactcaggaagtacaggtatgctgaaacttacattggttcaggatgacgacaataaaggtcgtatatctgtaaacatgctaagcagcgtattaggaaaagtttctgttgaggctaaggctgacagagaaagtcttggtatgtacattgtcagtgacacagcagtttcagatgaaggaagccagcttcttgaggatatggaagaaaatttaaaagaaggatttggatttacaaatgtgaccgtcaacattacaaaatcgtcagacgtgccatatgtgacttatgaagcagcggctgacagtgtggcaacagataagctgtatgaaattgcagcacagattgtaaaactgcttgcaggttaaagatttgcacagaaagtccgatatatagagcatgaacaggtaaatcggacagacagaaaggttaagatatgagaataggaactaatgtggcagcaattgttgccaacaatgcattacagaaatcacagaataatctgtcaacatcaattgaaagattatcatcaggatacaagataaatggatctaaggacgatgctgccggctgtgctatttctgaaaagatgagagcacagataagaggtcttagtcaggcccagaataatacagcagatggagtttctgttttgaatacagcagaaggcgcaattaccgaaatccagagtatgctcacaagattaaaggagcttagcgttcaggctgctaatgatgttaattcagatgatgaaagagaagctatacagaaagagatagaacagattaataatgagattgacagaatatctgatcagacagaattcaatacacagtctcttattaacggtaatctttcaagaagagtatattcagaccttcagggagttaatcagctttctgtatctgacagctatacagcaggtgtatatggaataactgttactgaggacgcaagacaggctatagcggtaggagcaggaagtattactatgtcatcaacagcttctataacaaaagaacaggaaggaacaataaacattaatggctacaagataagcatttccgaaggtgatacacttgataaggtgatgggaaagattattgacggagttaacatcacagggggttctgcatttacagttaaagaccttaataatgatacagcagctaatggtactgattatgcaggttatgtgccaacagcagattacgctggttcaacacttgttattatgactaaccagtatggaagcgaccagaagatgaatataacatgtgataatgcagagcttgcagatattttgggaataccacaggcagcaacacaagatggtatatatgtagaaggaagcgatgttaaggcagagattgctacaggagatgatggaaagcgaattggttttgctgattcggcaattctttcaacaaagggaactgtaattacagtaacagatgttaataacaaagagttttcaatggatgttccaggtaatgcggcaggtactgtatttgacgacagtaacaatgatggacagtcagctgcaggtgcaggtacagcaagaactataagtcaggaagtaacagatgttggaactatgagcatacatgtaggtgctaaccaggatcaggtaatcgttattgatattccagcaataacaacttattcacttggcacggaacatatgaatgtcatgactcagtatacagcatcaagggcgatatctactgtagatgaagctattaataagactaataaaatacgttcaagaattggtgcatacgagaacagatttgatcatacaactaataaccttgaggtttcaagtgagaaccttaccaagtcattatcaacaatgatagatactgatatgtcagaagagatgactacttatacttctgaaacagttcttacacaggcagctacgtcaatacttgcacaggctaatgaaagaccttcacaggtattacagttattacagtagtttaagattcaatggttatataggaaagggatgctatgactaaagaaacaattaagacatttcagtatagaattacacaggctacagcatcacagcttgttgtgattctgtatgatatggctatagaatatcttaatgatgcatgtgagagtgatagtgctgagcaggcacataataatatatatatggcgcagaaggttatagaccagcttatatgcggacttgatatgcagtatgagatatcagctaatctttttgtaatatataatcatatgaagaggtcacttatttcagcatctgtaagtcttgataataatgagattaacagaattacagggcttttaaagaaactcagggcatccttttatgaggttagtaaacaggatgattctgagccgcttatgaagaatacacaggctgtatattcaggtcttacatattcaaaaggtggaattagtaatgaaacacagactgataatatagaaaacagaggattcagggtttagctccgaatcctctgtttattataatctgcgtcttcttctgttatagtgtcttctctgtctttttcttcttgcccgttcttcaataatgtagatgataaaaagaataacggcaccaattccaacaagtatccatatattaattctgatacatgttttcggtttataagatgatgaaacatcattattaatgtatggcagcaggcttccggtatctgttccggcagcagatatattaagtgtagttgtgccgacagtattatcattgtataagaacttaagatgtgttgtcataacaccattctcattggtcatgtcataattatcatcaaccgtcattgatacatttgacaatgaacttttattaggtattgtgataaatgaagcatttagtccaaagtttagtgaaagagttgagaaaacagccgagttgtaatagttgtcattagagaacattgctccgagctggcttccggttgttgttgatttctggaaattggaaaatccccagtcaaaaagggttcttgtatcaacatatcttatctcatctgtggcttccttaaatacaacgcatataagacgcataccgtctttttctgcaaatgtaacaagtgtattctgtgattcatcagtatatcctgttttgccacccttgcagtattcataatagtaggcacgaccctttaacatcttgtgtcggtgtcttattgtacgctgtgcagacatgttagttgcaggaattacatatgcatcggcagttgaatcaatgctgacaaaagaagcattgttatagcaccctcttgcaatcattgccatatcatatgccgttgtgtagtggttggtattatataatccgcttgcattggcaaaatgtgtattcaaagcaccaagttcttttgccttggcattcatcatatcgacaaatgcatctattgagccagccacatgttcaccgagggcataagccatctcgttggcagaatacagcagaagtccgtgaagaagctggttgacagtaaattgctcgcctgcttttgaacttaagttggcatcctcatatacattaattgagttagcagctgactgtgaaaatgttacaacatcgtccatattacagttctcaatagtaaggagccctgttaaaatcttggttgtgctggctggataacatttttcatgagagttcctctcgaaaagaatggaacctgtatcagcatcaataagaatgcagctgcttgagttaacatcaggtgcatccggccatacagcctctgtgctggttgtgtctgtctcgctgtagactttgttgtatgctgcagcctgggtatccgctgcaaaagctgagaataccaaaacagtggcagatacagcgctggttatctttataagtaatccttttaaaaattgctttttcattatagagataattcctccgattaataaaatatacaaatacattgtagcccaggattgtacataagtaaaccccgcttggcaaaaagtgatatttatggtaaataatatataggaaactcagatttcggctatgtctgtgtgcggcatgtgctttcaggatgacttcgcttagcatgagtaaatgccgccatctgcaaagtctattacagtgcgtgaaatcaaacgcacttcgtttggacgtgctttcacgcactgaacttatgcagatggtggcattaactcctgcacagcttgtcatattcaagcgtataccgcacacggacatagccgaaatctgagctaatatataagataggagtaatgtatgagacttagaaatgtacccggagcaagggaagtaatgatagagaatgaatatgtgtttacagagccagaggggatgaaaggcacatggtcacaggttttcggtaacgataatccaatccgtattgagattggtatgggtaaaggcacatttataacaacactggcagcaaataatcctgatattaattatgtgggtatagagaagtattcaagcgtgcttttaagagctgttgagaaacaggacgaacttcagcttcctaatttaagattcatcagaatggatgcagaggctatatgtgaggtgttcggagatggagaggtagacagaatataccttaatttttcagatccatggcccaaagacagacatgcgaagagaagacttacctcaagacagttcatggcaagatatgacattatattaaagccggacggacaggtggaattcaaaacagataataaagatttattcgatttttcattagaagagattaaagaggcagactgggagcttcctgttgtcacatttgacttacataatgactctgtacttaacgagggtaatgtaatgacagagtatgagacaagattttcacagatgggcaatcctatctgtaaacttatcgcagtaagaaatcattaataataaatgcatatactatataaaggcttttggagaattgttgtgaagaataaagcatttgcaaggaaagtatcagaagtgatgtatgtgcataaaggtgcgaattacagagtggtaagatttaagaattccctcgacgatgtcgtgagaattcttaataccaaaaaataatctagaggtcatcgggcgagtcataaggctgcacggtgacttttcttttgtccagaaaatgctgcactgtaatgtttaacaggtagcttaatacggcaaatacgggaactccaaggaacattccaattacgccaaacagcgccccacctacggttattgagaacacaacccatacaggcttaagacctgtagtactgccgattatacgaggtccaataagcagaccgtcaacctgctggatgcagacaatcatgattacaaatatgataagtttgatagggcttgcgataacaataatcacaccgccaatcacgccaccgatgtatggtccgaaatacggaatcatgttcgttatgccgacaatcacgcttataagcactgcatatggcagcttgagaatcagcatgataataaagcagataatcatgacaataattgagtcaaatgatttgccgataatataattaataaaaatgcttgcacaattcttacagatgatgcgtgtattgtctgctgttttcttaggaagcacggcatataaaaatctcttaaaatgataaaagatattcttattatcagaaatcatgtagatggacacgataattgcaataataaggtttaacacacctgaaagaatggccatggatgtattaagaatgtaaggaaccatattggtaagtgcaccagtcatgtagtcaacaagtttaggaagagcatcttcaatcttctgattaatgaaattgtaatcaatagaagaattggcgtgcttatcttcaaactcagtgaaccagttgcggatattctcgtaccatacaggagcctgattggcaatctctgtaatgcttttgtatatttgaggtacaacaaagcctattaatactgcaaatgcgccaactgctatcaggtaagcaacaagaattgaaagcattttggcagctttcttggacttgatatggcatacccccatgaagaacctgttataaagggtcttgataaacggataaagaacaagcgcaatcatgccaccaataagaaatggtgacagtatatggaatatattgcccaatgacttgacggttgcaggccagttaccaatgaacttatatataagaattgcacctagcacaaaaagcagaccatatataacaattgtaaagtatttgctgttaggctggaatacattcttgccaacagctttgtcaggttttggcggctgttcctgttcagaatcaagattaatagcctcaattggaatattgtcaacgtgttttggctgttgttcgaatttttttaacttcatatcaactctcttttcttaataaatgtatattaaatataaatattttctcttaaaattgggaatataatagaattataaggggtataaaggcacatatcaatataaaaaacatggtaaaatgatgaaaaaacaagaaaattataaaaaaagataaattgttcttaaataaatacaaaaaagtgcttgcattttattaaatcttgctatagaatatcacttgtgcttgagacaacacaagagcacagaacaaaataagttacgcaccgctagctcagttggtagagcacctgactcttaatcagggtgtccagggttcgaacccctggcggtgcactggaaggtcttatgatttagggaatcctaggttgtaaggcttttatttttttatacagtaaataattgcagtagcagaaggaatatttacacaggaagcgttgagagtttatttcattgcagatggtgtgaatattccttttagtatatatgcatataaatatctgtgtagatataggtatgcgcaatactgcctttttgattggtagcttttttatgaatttgaaaatatagtgatttataatatgatacctataggtagtcggatttttacatttcttataggaagattctgtgagaaaattccgtattttatgaaaaattcctataagcagttagttaatgtttgattgataggttgaatattggttattaagtgtgtggaatgcctggaaagggaggttatctgcctataaggatataataaatacaagtttgataggttgagagtttccagaattataggataacaggatggttatcataaaacaatgttaatatcttgacaagatgatatcaaaatgatatcatacaaatatcaatagagacactattaaaagaataatcgataacaagattaataatcagggtgttaaggaggtatttttatatggaagaaaaggttttgaagaaaagcaagaatgggcttgcgatggttacactgtttatattactttacgcagtagctatagcagcaattattgtcggttcgattatggttgaacaggcagagactaaagcaggatggatagtacttatcgttgcaggcggtgtatacgcagcaataggttggatattctttattggtcttaaggtattaaaaccacaggaagcacttgtgcttacactttttggcaagtatgttggaactattaaagaagcgggattttactttgcgaatcctttttgtgtggctgttaacccggcagcgtcaactaagcttaatcagagcggtgatgtgacaggagatggaaataagcttgatttggctagcatggcaggtgttgcaggaatggcaattgcagcaggaaataattcacagtcagctaataagaagatttcacttaagataatgacactgagcaacagtagacagaagattaatgactgccttggtaatcctgttgagattggtattgcggttatgtggaaagtgacagatacagctaaggcagtgtttaatgtagataattataaggaatatctttcattacagtgtgacagcgcactccgtaatattgtccgcatgtatccatatgatgttgcagaaaatgtagatacaacgggagatggaatcgcagatgagggaagccttcgtggttcaagtgaagttgtagcagaaagaataagaaaagaaatccagggcaaagtagcagatgccggacttgagataatagaagcacgaattacatatcttgcgtatgcacctgagatagcagcagtaatgcttcagagacagcaggcatcagcaatagtagatgcaagaaagatgatagttgatggtgctgtaggaatggtagagatggcacttgagagattatcagaaaaacaggttatagagcttgatgaagagagaaaagcagctatggtatccaaccttttagtcgtcctttgtggaaacaaagatgcccagccagtagttaattcaggaagtctttactaatggcagattcaggtaagaaacaggttcctctccggttatcagctaaactctatgatgccattgcagcgtgggcagaggacgatttcagatctgtgaatggacagatagagtacctgctgaccgagtgtgtacgacagagaaagaagaacggtgcgccagttccgcacgagctggatgttccaccagagttagatatcaggtagaattaacaaaaataaatatataactattatatattaaaacctccctataccgacattataaatgctggtatggagaggtttttaaaatatacaatattgaataaatcggacattatatatgcatatccgttatcagaaattctaaccgcgagaattaaacttacttgtcataagtgaatataaatcatctgatgagctagaggcggcacctgatgatgtatatgagttagtaacataattaatgttagcctttgcaagtgatgatacattagagccaataattccaagtctctttgcaaattctgatgatgttccaaatgctttctttaaagtatctgtatcagctgctttaagtttattttcatcaattgaaagagaaccatcgtctttaagcgcaattcctactgcagataatgtttcagagttctctttaactgcttcctttaaaaggtcagaacacatagtgttgatagaacttgatgttttaccaagggtgttgtagagcttattataagaatcaactacagatttgatatccgcatatattgcagaataatcaccggtcttttctgcatcggcaaaaagagtggatttttcatctgtgaatttagctgcattctctgtaacagaatcagcatcatctttaatattcttgtaagcgtctttctgtaatttcttagtaagtgaagatgttgaagtatcagtttttttggaaagcaggcttgtaaggctgtcattgtcatcattctgaatgtaatcaagcagagtctttgatgaaggctcaatgcctgctttaagctggttagctgccagcatctgtgatgtaatccgcataagtttcctccttatatatcaagtgtgattgaatacacatttatcagctgaatattatatcggataaaaccaggtgaaacttaacatactaccttcgaaaggaggtggcataatgtttccagcatttgactataatcatgaaaaagatgagtacagaaacggatacgataatgggcagggcgataaaggttatgatgacggtgagaatgaatttgccagcaatcttgacgagagtgatgtaatgcgtccagtcaattcgctagatgattatacaagtttccttttgtggggaactgattttgatgacaagaataatatctaaaaatagtattaataatttattaatctttgaaaggctgattgactgaatattttcaatgttatatgataagcgaaaatggaggtatgagtttagtatgtatgggtatatagttgttgatcagccagaacttaaattcagagaatttgataaataccgttcatactattgtggtctgtgcgattcgctggcagaagcgcatggattgaaggggcagatttccttaagctatgatatgacatttctggttatacttcttacagggttgtatgaaccggaaactatatactctgaggaacgttgcgtcacacatccattaagaaagcatcctgtgaggcgtaacgttgtttcagattatgttgcggacatgaatgtccttctgacatattacaaatgtatggacgactggtacgatgagaaaaaggtcttgaaaagaacttatgccggagtattgaaaaaagatattaaaaagcttgagaagaaatatccgcataaggcagagattataaggaaaagcctttctaagttgtcagaatatgaaaaagcacaggaaactaacattgacaagccggcagagcagtttggcatactgttaggtgaagttgctgccatgaaagatgatgagtggagtgatgagttaagggtgcttggcaataatcttggcagattcatatatctgttagatgcatatgatgatttggaaaaagatgagaaaaagaacaattataatgtatttaagtatcataaggatgtagaggattttgatacatttgcagaaaatatacttaaagcgtatatggcaggatgtgcaagggtttttgagagactgccgattcttgctaatgcagaactgttaagaaatatcatatattcaggtgtatggacaaagttctacgccgccagaaggaagaaaaataacactgctggtaagcagttggaggaacataatgacagatccatataaagtgttgggagtatcaagggatgcttccgatgatgaagtgaaaaaagcatatagaacactgagccgaaagtatcatcctgatgctaacattaataatccgaataaggatcaggcagaagagatgtttaagcttgtgcagcaggcatataaccagataatgcgtgagcgtgagggaggatacagtagtcagtcatatagccagacgagatatggaacaggacgttcagaccattatggttatgacggtgattatcagaaccagtcacagggtggatatggagatttcggaagcttctggggattcggtccatttggatttggcggatatacgggaagctatggtggcaatggatatgataatatgagtggtaatgatcctacaacagtacatctgagggcagcagctaattatattaataattcaagttatgatgaagctattaatgtgcttaataacataactgaccgggatggaagatggtactactatagtgcattagcacatcttggaaaaggagaagaagcaacagctttggaagatgccaagcgtgctttggattctgatcctgacaatatgcagtatcagctgttgtatcagcgtattgcaagcggtggaagctggtatgcaggaagaagaacgcagtatcaggggccgtcatctacaacatattgtacaggctgtgctccgtgggttgcactctgcctgtgttcaaatatatgtatgcctatgtgctgtggctatggttcaggcggctattatccgggtggaagtatataaataaataagggatgttaccagactattgtgttaaggtaacatcccatttttaatgttatttttcttttttaatccatgcatcaaggttgttaaataatatatcaaactgcacaggacccatgtcgagtatatactgatgaaaatttttaagattgaatttgtcagaaagctcgctttgagccttagtctttaactgctcaaatcctaacattccaagaacgtatttgcaatagttgcctgggtcagagacaaatgcgtaatacatttcgtgggcgactgatttatcatcaaaaccatactggctgatgaatcggtaaacatcatcttcactccatccatagtaattaacaccaatatccccttttgcataaaggcacaggacagtggcataattagcagcatacattttgttaagtgcatcgttgccggtctgtgcataattataagaaagaacttcaacgtatgatgcccagccttcaacatatccgcctggtgcaagaatgtatcttatccagtcaggattggttgcggcaaaatactgtgtctggtacatgtgtcccggatacccttcatgtgcaagtgtaggatataattcactcgcagaagtgcctgaagaattgatgtatattgaattgatatcaaggttatcaagctgcggaataaagtacatagccggactggtgtagtcctcaagcgcctttgacacatatttgatattataattcacatctggaatctcagggaaatcatcggttattcttttcttaaggtcggtaagtatgccaaccgggtctgtcatattgaatgaaaatgtgtcaaatttatcaagaatagaggagtctttaagtgcaagcgactgcattttaagcatatatttcttgaggtaagaatcaaccagcttatcgtattcgtcaacagatttgctccagccaagtgttgaagagagtatatattcaaaataccgtgaaccatcaggataattgcataaaccgcctgaatatctgttagagcctttcaatgaagtaagcgcatttacaagggactgatatcctggaattacatgttcattgactgcggacacatttttagctttataatctgcaatatcctgagaagaaagtccgtcaacagaagcgagcttttcgttaaaggttgatatcaatgcaccgttttctgaaccggcagtctcaaggaatgagttacagctttcgattacctcgtcggcaagggtatcttccataaaatatccgttatcagcacgaagcttctcaaatgcggacatattttcaaagtatccgtcaacatcgcagagcagctcaatatattcgtcaatatcctttttttcttcaaatgtgtattcggcaaaaagcagtggcagctggacatgaatacctgtagttgtctgaagctgtgtattaaacatgtacaaatcactgtattccaacgcattttccatgtacataagaagctcgtcaagcgttatctgctgttttgctgagagtgtgcttctgtcaaatgatttaagagttgatattatgtcggtgtaatctgaggagtcatcgggattatcaaggtcgtagcggccaagagtaatctcataatcgttaattccaaaatccctggggtgttcgacataggcatgcagggacaccatatcggcacttaacaggtcagcaaacaggttgtttacgtattccgtgaaatcagcgttatcctcggcggcagatgtgatgttttctgatatctgcttgtgattccaaggcaggctgcagccagacagggtaattaccattataaaaattatcagcaggctcacagccttgttaagaaattgatgtaaaaggcatatttgtttattacgcatactaatcctcatttctgtcttaattaatattataagaaatattgatttattattcacatattgtatcatacttaatacagacttgacacttattgtaaatttttttatgataaagtttacggataaatgattcacactacatttgcattatagcgatgaattaaaataatagattatggaggaattgatatgccacagagtaaaggtccattttatatgacaacagctattgcctatacatcaggcaagccacatattggtaatacttatgaaattgttcttgcagacagtattgcaagattcagaagacaggaaggctacgatgtatttttccagacaggaactgatgagcatggtcagaagattgagcttaaggctgaggaagctggaattacacctaaggaatttgttgacaatgtttcaacagagattaagagaatctgggatcttatgaatacttcatatgataagttcatcagaacaacagatgattaccatgagaagcaggttcagaagattttcaagaaactttatgatcagggagacatttataagggttcatatgagggcatgtactgtacaccatgtgagtctttctggacagagagccagcttgttgacggaaagtgtcctgattgtggacgtgaagttaagccggctaaggaagaagcttatttcttcaagatgagcaaatatgctaacaagcttattgagcatatcaatacacatccggaattcatccagcctgtttcaagaaagaatgagatgatgaacaatttccttcttcctggacttcaggatttatgtgtatcaagaacatctttcaaatggggtatcccagttgactttgatgacaagcatgtagtttatgtatggcttgatgcgcttactaactatatcacaggtatcggatatgatgctgatggcaactcttcagagcagtacaagaagttatggccggcagaccttcaccttatcggtaaggatatcataagattccatacaatttactggccaatattccttatggcacttggagagccacttcctaagcaggtatttggacatccttggttattacagaatgatggtaagatgagtaagtctaagggaaatgttatctatgcggatgaccttgtagacctcttcggagttgacgctgtacgttactttgttcttcacgagatgccatttgagaatgatggtgttatctcctgggagcttatggttgagcgtatgaattcagaccttgccaacacacttggtaatcttgtaaacagaactattgcaatgtctaacaagtattttggcggagttgttaataagactggtgtagaggatgctgcaattgacggcgaccttaagactgttgtaacagcaacaagagataaggttcaggctaagatggctacacttcatgtagcagatgctattacagaggtattcacactctttaagagatgtaacaaatatatagacgagacaatgccttgggctcttgcaaaggacgaggcacagcaggacagattagcagaggttctctacaaccttgttgagagtattacaatcggtgctaatcttcttaagtctttcatgccagagactacagacaagatttttgcacagctttacccggctaatcccgaggcaggagtaagagattttgatgaccttgctgcatttggcttaagagaatcaggacttaaggttactgagactcctgagattcttttcgcaagacttgactttgagaaggacctcaaggaaaaggttgaggctattcaggaagcacagaagaaggctaacggagttacagaatatccacaggttgaagttaagccagagattacatttgatgattttgaaaaggttcagttcagagttgccaaggttcttacatgtgaggctgttaagaagacaaagcttcttaagttcgagcttcagattggtgatgagaagagaactattgtatcaggtatccagaagtactacaagccagaggagcttattggtaagaagttagttgtatgtactaacttaaagccaagaaagatatgtggtattgagtcacagggaatgattatctcagcatgggatgataaggacaacttatcagttcttacacttgagaaggatattattgaaggcgcagagattggctgatagatatgaagatatttgaaactcatgctcattatgatgatgaaagatttgatgaggacagagatgaacttataagcagcatgcttagtgatacaggggagcttgattacattgttaatgtaggtgcaagccgtcagggctgcgaggcttcccttgcacttgctgcacaatatgaaaaggtatatgcagcgattggttaccacccggaggatgttgtgcgattgaaagaatcggacattgaatggctggaggagacaatcagaacacagagcatcagaaaaggcggcaagattgttgcgcttggagaaatcggacttgattactactatgtgtcagatgatgcagatgttgctgcggctgaaaagaagcagcagcgtgaatggtttgcagcacagatggatgttgcgaaccgcacacacatgccggtaatgattcattcaagagatgcatgtcaggatacaatcgacatattaaagagtaatcatggacaggatacaggcggaataatccactgttattcatacagcagggaagcagcaagagattttcttaacatgggcttttatataggaatcggaggcgttcttacatttaagaatgccaggaagcttgtggaggcagccgagtatataccgatggatagaattgttcttgagacagacagtccatatatggcacctgagcctaaccgaggtaaaagaaacgacagccgcaatataaaatatgttgcagaaaagctggcgcagattaaagggcttgatacgcaggaggttattgatattactaaccagaatgcgagaaggctgctttttgcggagtaaggtttcgaggactttggtggcggatttgtatgtgtatttgccggtggggccagccattttactgtgtgaattgggctgaaacctataaattataataaaacggctatttagtaggtcttttaacgtggtttttattgataaaaccatgaaaacacctactaaatagccgttttttgttgttatataggtctttagtgtagaaataaccttttttgtgtgaattttgctgcaaaaaaacctattaaagcagtgaaaatgcgactacttataggtatcacgttatctacctgcacactcgaatccacatcctacgcgattggtatagttatttacgaaacattgtactaacccagcaggttactaagctctgcaaactgctcaagtgtaagggcttcgccgcggatagtaagcggaagtcccatagtttctaatgcgttggtaagatcttctttcgtgatgccgatgccggaattgccgacactgttaagcatagtctttcggcgctggttaaatgatgctcttattatcttgaacataagatgttcattcttaacatcaacaggtggagttttgaagcgctcaagacggataaccgctgaatcaacattaggacgaggcatgaagcagcttgcaggtacattaagcacaaccttaggcttggcatagaactgtacagcaagtgaaagagcgccataatctttagttccaggaccgcactgcatgcggtcagctacctctttctgaaccatgatggttatactgtctaatggtacatggctctcaaaaagtcccataataataggtgtagttatatagtatggaagattggcaacaaccttgattggtctgcctccattcttctcatcagcaagcttcttgatatcaagctttaagatatcttcattgattactgttacattatcataataagaaagagtatcttctgtaagaatagggataagcttcttatcaatttcaacggcaacaacttctctggcattctcacacagaatctgagtcattgttccgattcccggaccaacttcaacaacgaaatcatctttggtaacgcctgcttcccggacgattttctcaacaacattttcatctataagaaagttctgcccgaactttttcttgaaatcaaaaccatatctgttaagcacggcaatcgtgttagttgggttgccaaggtgcataacattattatatttattatcgctcatattgcctccaatctataagaataatgttatgaaacttaataaaaaatgtcaagctgcaataaaaatgtagtgcaaaagtagcttttgtatgatactatagtactacttacaatcgagaacatattatcaggagatatcatgagcattaataaaaaagaatttaatctggaacaggttgttaaactatgcgtggttgttaacatatcgttgtttttatttgttgcatttatgctgatattatttgtatattttaatataacaccaatgatttattacagtgtaatagcactgattggttatgtgttatattttatgctgttaaaaaggctgaaagtgtgtgcatatatgtggtgtgtgtatgcaacaattataatttatatggctattgcaacaatatgtcttgggtataaatgtggatttcatctgtatagcatgtcattaatacctataatattttattcacaatacatatcaaccaagatcaatacaaaagacccgaatccactggctgtgtcgatagcaatagttgctgtaagtataatatcatcagcaatagctataattaacggaccattgtatgaaattaataaaacaattatatctgtgatgcttgcatgtaatgcaataagtgtatcagcatttttaatatattatactaaggtgatagtcgatcttgttattgagtctgagaagaagcttaattcaattgccaacattgatcttctgacagacctttacagcagaagatatatgattaattatcttgaagaatatgatgcggacgatgaaggctggcttgcaatggcagatgtagatgatttcaagaaaataaatgatacatatggacataactgtggtgattatgtgttaaatttcattgcacagaagatgaaaaatatatgcagtaactgtgtgatttcaaggtggggcggagaagaatttcttatatataatggaacacacgacagcacacatgaagtattagaaaaattgaggagagaaatagaaaactctgaatgtatttataaacagcagaagataaatatatcactaacaataggagtggcgcagagaaatgccgatggtgatatagaagaatggataaagcgcgcagatgacaggctttattacggaaaaaataacggaaagaatatggtggtagattaagataaaacctccctgatggaatattttcttaatgcatggcataaggtgcataagagagttaatcatcagggaggtttattgtggattatcagcgtcttgtttcatacatatattcatatccggagggagtaaagggcagaaatgcaggctttgcaaaggcattagttcatcaggggcagttcaagttaagcatcagtttaagaggtgttaaaacagacagtccggaaatgtttggaatatatatgatggttgctgacaacggctacaggcttataaagttaggggaatgtcttgtaaaaatgggacagatggaatacagtggaatattcaatcctgataatatcaatgaaaccggttatggatttaaggatatatgcgggcttgcggttgcaagggaggatgcaagatatgactgtatgatgtccatgtggaaggatgaggacgtaactcctgacatgcttgtgttctcaggaatggatgcaaagaagcaggtggaagccggaatagttataaaagagcgtatgagacagagtgaggaggaagagaaacgacaggagacagcagagtcttcggtggtcagacaagagatggctggatacaatgcagcaatgagggaacggggacagtcagaatcaggcggacaacagccggttcagtcagaatctgcaatgttagcgggaaaatcagaaatggttcagacgaaacagattgtggtggaagaacagcagatagttcagacaaaacaggcagaggtggctgccgaaagtgtaaccatgccggagaatataaaagctgatggagcagcagctaaaatatctgcggaaacacaacatttgcagcaaaaagcaaacagagccaatgcaacgcagacggatccttttgaaaagctttttgtgcgggctgattatatagatgcatttgacgatgattacttctatgattgtatagaagtgtcgccagagaagttaaagtgtcttaaccagaatgaaattgatatcgcgggaaacagcttcctgctgcatggctattataatttcagacacatactttttggaagagtgcgcgataaccttgataatactaaatatttcattggcgttccgggaatgtactgtaaccgtgaacgttacatggcttcaatgtttggctttaataattttaagaagagtcacaggagtgactatgccaatccatatttcggatactggtatcaggagatatagacgaatcttaaatgatcctgccatgagccgttaagctttacataggagtaggcggtaccttcagatataaagccaagagatttgacaagattaatagaggagatgttttcagggtgaatgtaagcttcaatcctgtgcatctccttttcgcgtgtaagaatctcaagcatatgtttaaccataaggcttccaagtcctaactggcggtaattcttatcaatcttatatcctatgcggcaagaacggttaatgcttgtaacaccaaaaaaagatacagagccgagaatttcacctggtaagtcgtcagaaaaaaggaaaaatctaccaaattcaccctttagtaaagcagcatattcagctttaagcgtggctgcaatatattctgttgtatagaaattatcgggcttggcagcttcgtatctgtcgaattcttcgcggtttctgctgtagaactcaagtacttttcctgcaaatgtttcatcaagtactttaagcttcatgccttcaaaagtgtattcaaatttcataatcattctccatcagtagtgaaagtagtattctttttcttgcttttgcgcagttccttgaaaaatgttgtgagcatttctgaacattcttcttcacatacacctttagtgatctcacattggtgattgaatgtgggaatctgtaagatattaagtatagaaccggcacatccggctttgggattcatggaaccgataacaactcttggaattcttgcctgaacaatagcacctgcacacatctgacaaggttcaagcgtaacatataaagtgcagttctcaagccgccagtcgttcatgtagcggctggctttcttaattgcagtaatctcggcatggccgagagaggttttatcagtgttacggcggttgtagcctcttcctataacctttccttcatacacaatcacacagccgataggcacttcattgagtttataagccttcttagcctgtgtgattgcctgtttcatatatctgtaatcatctttttcaaaaaccacctgagtattctccactagattatcctccactaaatattataaaaattttaacttttttgtgaaaatgcgtcaacttatcaggaacatttttcgtattaataataaaaggagggaacgtgcatagaattatgattgcactggcacagagtagtagtataatgattatataagcaggcagtatcgggggggatcaaaagtcttatacttcatgcatcggtaggacaatcatgattgtgcgttatgtgtcagagttagtggctgagcttattattatgctggttatgatgaaggttggaaaatcattaggaaagagaaggtacagggtatgaaattagaggtgaggaatttaaagaaaacttatggtacagttcaggcactgaaggggattaattatacatttacaccgggagtatatggtattcttggtgctaatggagcaggaaagagtacgatgattaatcttatcactgataatgtatcaagagacaagatgaatggcggaagtattctttttggagaggacagtgccgaggaagatatattaaagcttggcaaacagttcaggggtctggttggatacatgccgcagcagcagggattttatgaggatttttcgcctaaagcatttcttaaatatatggcagagattaagggggttaagaagattaagactactgatgacaatggcaatgaggttgttaagacagtcaaccagcagattgacgagctgcttgaggtagttaatcttactaaggttgcatataagaagattggaggattttcaggaggaatgaagcagagagtgctgcttgcgcaggcacttcttggtaatcctaagattcttatacttgatgagccgacagcaggacttgaccctaaagagagaatttcaatcagaaactatattgcagagttgtctaaggacaagataattctttttgcaactcatgttgtaagtgatattgaatgtattgctgataaagtacttcttctaaagagcggagagataattgcgacaggaacacctgttgagcttattgaaagcatggctggaaaagtcggtgagataacatgcacgcttgacgaggtcggagagctgcagaaggaatacaagattggcaatatcagacagagaaagaacggtcttgcgttaagagttgtaggtgatgagctgccagaagaagcagtaaaagttggagataatattgaccttgaggatgtatatctgtattattttgagtagattatcagattatgagatagtcggaataacggattatcagattgtcagggagaagtatcatggaacttattaagggaagacctgctgatgaaacaggaagattagaaaaagaaatcagagtatatgatttattggacaagcttggaatggaatattacagaacagaccatgagcctgctacaacaatggaagtgtgcaatgacatagataagattctggacacacttatatgtaagaatcttttcttatgtaacagacagaaaacgaatttttatatgcttatgatgcctggtgacaagccatttaaaacaaaggatctgagcaaacagattaactcagcaagactttcatttgcagatgaatcatatatggaggaatttcttgatataacaccgggctcggtatccataatgggacttatgaatgatacggacaaccatgtgcagttactgatggataaggaagtacttgagggtgacactctcggctgccatccttgcatcaatacatcaagccttaagttaaagactaaggaagtgatggagaagtttttgccagcagtccaccatgaagcggtgatagttgagctcccgaggtatgaagaacataaagataacgaacagggataatatgtagagatatgttttaggcagcttctgcagggattgtggaggctgtctttttggtgcgtgaggtgttgcttactttgtgaggggtgttgctggtgcagcgtgttgtagtatgttgcagcgggaaagacctacgcaagccgcataatatgcagaatgagtgggtcgaaattatgagagaatgacgtggaggagcgagaaaaacctactaatcaagttaaaacagtggagatagtaggtctttggagaggtaagagtatcattaaatagaagaaagtttggaaaaagacctacgaaaaggcaagaatataatgattgagtaggttagcaagaggggatgacagtctcacagtgcttgaaaagacctacgcaatagcgaagttgatagaggatagtaggttttggcaagtttctggtgatattcgggagtggtaagaagttggttttgccgcctgttctgacaaggattgctaaagccagtccttaggaaatgattcttagggactggcttatttagctgtcttattttgtcaacgcttcacaccttgacaacaagcatatataacaagtataattgaaataccgtgcagccggggtagtagcggcaccttgaacctgcaatccgctatagcaggggtgatgttcggcagagggctgatatttatggagcagcccggtgtaagtggtgttgacatttgggtctttcacgacggaaatccacgaaccatgtcaggtcaggaatgaagcagcattaagtgggaccttccgggtgttgaaagggtgcctggatcgagctaactgcatcggtaacgtctgtggatatcagttcgaagccggacgcacggcttttgttattaaaatgttactcgtcgcagctaatttaggaatgtcaggcagattcgtcatgcttgcatgtaagaaactgtatgatattcctaaattatcctgcgaagcaggaacttaaccgacataagtaaaacataagctgcgaagcagcggcagacgccggaggcggatggttttacgcatgaggttaagggctgcgaaagtaaagacaacgcagagggaggtaaccatgtcatatcaggctttatacagaaaatggcgtcctgacaatttcaatgatgtcaaaggacaggatacaatagtaacaaccctgcgaaatcagattaatgcagacagaataggccatgcatatctgttctgcggaacgagaggaactggtaagacatcagttgccaagatatttgcgaaggcagttaattgtgagcatccggttgatggcaacccttgtggggagtgtccgacatgcaaggcgattgcggctgggacaagcatgaatgtaatagagatagatgcggcatctaacaatggtgtcgataatataagacagataagagaagaagtacagtactcaccgacagaaggaagattcaaagtctatataattgatgaggttcatatgctttcaataggagcgttcaatgcattgttaaagacattggaagaacctcctgcatatgtaatatttatacttgctactacagaagtggcgaagattcctattacaatcctttcaagatgtcagagatatgacttccacaggataacaatagagacaattgccgcaagactgtcagaacttatgaaggcggaggggctgaatgtagaggacaaggcaataaaatatgttgccaaagctgcagatggttctatgcgagatgcgttaagtctgttagaccagtgtctggcattctatctgggaaaagaccttaagtatgaaaatgtattagatgtacttggggcagttgacacggcggtatttagtaaaatgctttcaacaattctgtcaggagatgttgccgtgtgcatgtcacttatggaagatttgataatgcagggaagagacctttcacaatttgttacagactttatatggtatcttagaaatctgcttcttattaagacaaccaaagatgcagaaagaattgaagacgtaatagaagtatcggcagataatcttgaagacctgaagaaagatgcacagaatgtagatatagatacacttatgtattatataagagtgttgtcagaattatcgaatgacctgaagttttctacacagaaaagagttaagacagagataacatttataaagctgatgcgtccggcaatggataacagtcaggatatcggcgatgttgtaagccgtgtaacaatgcttgaagggcagttacagaaagtacttgatgatattaaaagcggtaaacttgtaagcgcagcaggtatggcgggtggcgctgcgggaggtcaggcagcagtacagcagcagactccaaagaagcctgtagttaagcgtgtatatgatgcagttccagaagatgttaaggcaatagctgcaggctggaaggatatcatagcaacgatagatgacccggttaatcagacatttttacaggctgcacatgttacattagcagaagatggaattagtcttgaaattatggtagaatcacttagtgcctataattcactcagcagacaggaagttatggaaagcatagagaatgtcattgaggagagaacaggagtaagggtttcaattaaagtgactaagcttaacgatgatgaagatttccacagcagattcgtggatcttaaggaactcgtaggcatagatatagaagtagatgataaggaggaacttatataatggctaaaagaggtggttttccaggaggaatgcctggtaatatgaataatctgatgaagcaggcacagagaatgcagcgtcagatggaggagcagcaggcagagcttgagaataaggaattcagtgcgacagcaggcggcggagtagttgaggtaactgttacaggtaagagagaagtatctaaggttaagattgaccctgaagcagttgatccagatgatgtagagatgcttgaggatttaatcgtagcagctactaatgaagctttaagaaaatgcgaagaagagtcacaggcacagatggctaagattactggaggacttggaggattaggcggaggcttattctaatggacatctacagtggtcatattaacagattaattgaagaattgtcgagattaccaggggttggggcgaagagcgcccagcgcctggcatttcacattataaacatgcctgagtctgaggttaagagccttgcagacacaatgattgatgcaaagcagcatattcactactgtaaggagtgttttacacttacagatgaagaactgtgtccgatatgccgcgaccagaaaagagaccataagacaattatggtagttgaacatacaagagatatggcggcatatgaaaagacaggaaagtacgagggcgtatatcatgttcttcatggagcaataagcccgatgcttggaatcggaccggctgatatcaggttaaaggagcttatggtaaggcttcagggagatgttgacgaggttattatcgcaactaattccaatctggagggtgagacaacagcaatgtacataagcaaaatgataaagccaacaggaattaaggtgacaagaattgcaagcggagttcctgtcggcggcgatcttgaatatatcgatgaggttacacttttaagagcattagacggaagaaccgagctttaaatttggtgaagaaccaagctttaagcttaatgtcctggcgcaccgggcgttaagacaatatgtgtaaaatgcgtgcgcagaaatgaagaatactatggcagagaatatgacaggtgatatcatatcggatcaccgtgaacgaatgcttaatctgaagaaatattatcctttcttcagactgatagacacatcattttctaatttcaaggatggcaaatacgaaatccttgatatgggctatatagttatggcggttctccgtttctttatagaggagaataattttaaggaaaaggatgttacatatcccgaatatctcgatttcttaaggctgatacttaagagagatttcgggcttgatttgaatgaacaggacagcaaggagattgctgattatatatttgacaagataaagaatgatggcaggccatttgaattctcgtattttgatccggtggacaggaaaaagagagtatcaagaatgaagataatcgagagttcgataagagacaatactgtgtggtattcgataagccctgatgctattgaattctatcttgataccaaggaaatcaaggacgagagcaggataagcgtatcccagcttcttcttgaaaaaatgattaattcacagaacttccgtggcggagttgaagtggttgaaagaatcaacgaagaggtcaaccgccttaagttaaagaagaatgaagtgctgacaattctgtcgggcgatgtatttgcaggaatagaggcttatgaggaattcgtcaagacaggaatgaaatggtttgatgatgaggaaaagctttttaagaagaaccgtgaccttattgcgaaatcaatcgagaagcttaatgcatcgggtagcacaggagaaggctattacaggacaatgaacgagatatacagtcttgagacacagcttaagcaggcgatgaacaggcacagcgagctgttaaaagattgtacagaaatgcagaagatgaccgatgatgcagtaagacgcgccaagcttggcagattaagaagccatatggatttcacatcggcactttcagatatgattaagagggacaatgcagatatattagtcacaatgttaagtccgcttctaaagccgaacataagaaagacatttgacctgataagcattgatgatgcgcttatggtgaagcccccaagatatgaggagaaggagcttataagcaatgaaagaccggaagatattgagtttgcagatgagattgaagaaaagagaattaaggataattacgtattccttatgaaaaatctcattgtgtgtttgaaaaaatcggacattataacactcggtcagttcgcagatgcaatgaagagggcgtatggtgagcaggttttaagaaatgcagattttttctctttctttgttaatctgtgccagaaggatgagtaccagcttggtggtgatgcgggagaagatacatttcttgatgcgtacttagaagaaggctttaaagatacggaacgctttacatttgcaataagaaaagggcttagcgggcaggttatattgtcggataactgtatgatggcagatgttgaattggtacgaaaggaagcacatggagaatagaaatctagataaggcactggatatagtttctaagcttatcacaggggaaaatgtgtctgagaggggcgacaatgcagctctttatcaggaatacaataataatgcagaagtgtatgacatagttcatatgtcattaaagaaacttaatcttaacatatacgaatataacaatggcctgtatgtgagtgcgggtgataataacagggtgtttggatattccaacgaggaattaagaaatgtacttgggttaagagttaataaagaattatatcttgcgtatttcataatctacaacataataacagagttttattcagatacaatgagttctacttatgctgagttcataagacttgaggacgtcattaaaaatgttgataagacaacaggcggtattgtcgataagagcgcagggcttgtgcttgatgaggttgaggagaacagttttaagcagatagcacttacatgggacgagcttccggtgacaacagtagaggatcagacaggagcgagagcagcaagaaattcaaagtcgggtatggtaaagcttgtgcttaatttctgcgttgcgcaggaacttttagttgagagtcaggacagatattatccgacagacagattcagaagtcttatagagaattattttgatgattacagaggacgatttgccgaacttatgaatggaggatgcgatgccacagattaacagaatcagagttaataatgttaaatataatttcggtacacaggtgtacgacgatttcgtgatgcgattcaactgccagaatactatatatgaccttgccaatggcggtggtaagagtctgcttatgctgcttcttatgcagaatatgcttcctaactgcacacttgatgacaagcagcctattgagaagcttttcagacagggaagcggtaatacatgtattcattctttggttgagtggaagttagatccatgttatcagaaggatggtttcaggttcatgacaactggtttctgtgcaagaaagggaagaggcacagacgatgagaatcaggatggacaggaacagacagctgcaccgacagcaagtgttgaatactttaattactgcatattctacagggagtttggcgataacgatattaagaatcttccacttgtaagtaatggagagagaattacatataacggacttaaggcttatcttcgtgaccttgagaagggcgggtacaaatatgttgttaagatatttgacagaaaaggtgattaccagagcttcataagcaactacggaatatatgagagtgcatgggaaattgtgcgtggaattaacaagacagagggacatgtaagaacatatttcgagtcaaattataagacaagccgtaaggttgttgaggatctgcttatagaggagattatccagaaatccttcaataacaagctgtcagttgataatgatgagggcatgatggctcagactcttatggatattaaggacaagttagtggagctttcaaagaaacactcacagcttggagcatatgacagccagattgcagctatcgacagttttaaagaatatctgtcgacatatgaagcattttacaacagaaaagaagaaatagagaagcagctatatgacctgcttcttgttgctatgcgggaaagtgataagaaggataaggaacttaggagtcaggatgaccttatcactaagatgtatgatgagcttgcacacgagaaggaagctatagcagttgcagaggttatgtctgaaaagaattcgatggcaggagttgagagccttgttaatgagacaagaaaggcacttgaactcaagaacgctgcaattgaagaggcaagaggaaagctttctttgatggagtctgcgggtgattataaagattatgcagaatacgagaagtcctataaaggacttcagattgcgatagataacagattaagagaagatactgatataacagcagagttaaagatacttgctgcaggttacagaaaattctatgagacagagaccagaagacttaaggaaaagcttgatatagcagctaaccgtgttaaggctctggaagtcagattatcagagtctaaggataaccttagaaatgctgacaaagaggcggcaggtcttggcagtctttctgataatcttgagaatgagatacaagaattacaggcacagcttggagtagctttatcagaggcgggaactgtcgtatgtgaaaatgcgtctgaagaatatgataagtcattcagggataaagaactgttaaagaatgaagagacaagaatgtccgaaaagttcaatgatgtgcagcagcagttaatgtcacttaatgagacaatatctgccaataaagcacttaatgatatattcacagagcagtcagaaaagctagaaaaggctgatgaagctggtaatgcagatgccgagcgtatgggcaaaatccgtgaaatatacagtgcagataatgacgaggcaaagctttcggttattcttgagacttaccagaagatgcgcagtgaatatacagaagagtgtaaggcagcacaggaacttgagaactttattgacaatgcaagaaagggaacatatatctgtaagagtcctgaaagagacaggcttaaggaataccttgagagccagtacggttcagatgttgttgagggacatgagtggtttgcagccctgaatgcaggacagaaaagagatgtattaaagagaacacctttcattgagtacgcatttataataaagaacgatttcgagagaatcaaagcagatgagatgcttaaggattttggcaagggtgcggctgcttatcctgttataagcgagcaggtgcttattgatactaagttagagattaacaaagacctgattgtattcgcattaaaggatatgtcgttcctgcgtgatgaggcaaagcttcagacacagattaagcttgcacaggaggagcttgagtcgcataaggcgcaggcaggaaagctggccgacagaatggagcttgtgtggaatgattatacatttgcacttgtatataatgctgtgtctggaaaggtggatgtgtccgaggcagaagcaatcagattaaagattgctgacagcgaggctgcaattattgaggctgagaagaagagaagtgtgttaaatgaggttaaagagcagctttcaaggaacctcgcacagacaagagatgatatagaagagaaggaaacagcatgcagcctgctctcgcgtattatggagatgaatgcttctatagataaaaagtatgagcgcttaaagggactgaaggctgatgtggacagtgcaagaaaccgcatatatgagtgcgaggaggcagcagcttctgctaattctgagtatgataccgcgagagatttcgaggacagtacaagaaaggcatatgatgaaatcattaagtcatgggaggagcagtacgcaccttattatgatgaaaatgtttcaatagaaatcgatgacgatacataccgtcttgataaggatgaaatagagagcagattcaccggattaaagacagcactttcacagaagaacagtgactttgcagataagcaggcgctgatgaaccatctgtctgcatctatgaacaaatgtcgtgatgcaatagagtacagaggttatacatttgacgatattaaggcaaagtatgaagccggtgagattatggcagcaggttcacagcagttaaggaatgccaaggatgctcttaataatcttgtgaagagcagtgattctgtaagggaagagcttgagtcacaggaagcacttcttaacagacttgagggaagtatcgcacatggtattaaccagattgagaataattatggaagctttaatgaattcccatgcgatgacccggatgaattcattacacagcacaaggtacttattaagaagttagaggataacaccaaggttcaggaaaggacacgcagacagatgtctgattcattaaaagacattcttgtatgcagaaaagaccttgaaagaatcgtgtctgatgcgggcatgcatgttccagaagaattccgttctgaggatgcacaaggaatttcggctaatcttacagaatatgaggctgttcataaagaatatgcttcaattaccagattagagtataagaaggttgatgaatttaataagaataaatctaagcttattgacctgcttaacggatttaatgcagttgagcttgctgatgaagtaaggatatcacttaatgttcctgaaaatgtggctaagaccagaagtatgattgaatcgttaaatgagacgaacacatttatacagttagaaaaagaccgcattgccaagggtatagaggatatgcagatgattaaggataactttgaaaatcgttgtatccagacatgcagtaatattaagactgagcttgaccgtctgccacagttgtctaatatcaatcttgacggagaacagattgcaataatcagtttgcagattccttatataaaggaagaattatataaggaaaagatgtctgaatatattgatgaaactgtttttatggcggaaagttttaaagagcctgcggaaagactcaagtatataagaaacagactgtcatggaagagacttttctcagttattgtcacagatatgaattcaatcagaattaatctgtataagagagagagaatcaaggaccagagccgttatttaagatatgaggaagcggttggctcaacaggacagtcacagggtatatatatccagttccttattgcgattatcaactacatatctaatatgaattcttcaggtaatgaaggtgttgagggtaagacaatattcatagataacccattcggtgcggcaaaggatatatacatatgggagccaatattcaagctgcttgcaactaatcatgtccagcttattgttccggcaagaggtgcaactcctgctattacaggaagattcgatgttaattacatacttggtcagaagcttgttgattcaaggcagcagactgtggttgttgattattacagcagcacgaaggaatcagaattggaatacacgagaatggattacgaacaggctacatttgattttttgtaacatatttgtaacaattctgtgaacttggtttacaatgaacttaggctgtgctaaactttaatgagttgtaaaatgcgataaataaattattcacaacattcatcaagtaagcattggaatgaggaatatataatcatgaataaatacgaattaggaattaagatagaccagattaagaagctggcagcgaaaaaggaatacacagaagcggcagccatagctaaggatattaactggactaagattaaagactggcaggcacttgccacagccattaatgtacaggaagcagtcggggactatgaagaagcaagagacatggcaattcttgcttataacagaaaccttggcggaagaaagctggtttataagcttactgaattctttattaaagttggagattttgataatgctaacgagctttatgaagaatacagcaaatcttcacagcatgatgtgagcagattcatcctgtattatgaccttagaaaggcacagaatgcatcagataatgaacttgtaggaatcttagaggattacagggagcatgagattgatgagaagtatatgtatgagcttgcaaagctgtattataagactggaagaaaagaagaatgtattaagacatgtgataatatcgttctgtggtttcaggatggtatatacgttgagaaagcagtacagttaaaggaaaagcttggtgttgttcttactaagacacagaaaggtatcttagaagatgtaagaaaaagaaaggaagatatagaggcaactaaggaagagctttttgcaaagcagaaggaacttgctaatcttaagagagatgaagttgaagatgttttccgtgaagaagatgagaaagaacagaaatcaactggtaaacagccagtgccagaggtaagtctgaatgttcctgagtttgctaaggaacaggaggaaggacctctttcaatagaccttgtacagaacgaccagaatgatgatatcaaagcatttttaatgaaagctctgaataaggatgaagatgcagataatactaaggacagctctgttgttatgtctaagatagagactcctcaggtggagaagccagaggtttctgagacacttagcaaagatggagagaagaatttctcaagcgagattaataaggcaaatgtctcacttaaggagcttattgagaatgcaaagcagaagttagctgataactatgagcagatcaataaagaagacgaagctgaacagagaaaagaagctgaggaaagaatcaataaggaagcagagaatatagatattaatgttcctgtacctgaatataacaatttatatgatacaagaaatcttcaggaagagcttgctgccaagatgagtgacttgttcggtgatgaggaagaagatgctgatgttaagacatttgtaccagcttctaagaataaggaagaacagcctgcagaggaggttaagactccggctcctgtagctgaacaggttgttaatgatgatgcagaagctcaggaagatgatgaccagattgaaggccagatggatataacagagtggatgcagtctgtaagagaagaaaagtatggcaagcaggatactaaggaattctccaagtcagagcttgagcgttatcttgatgagaaagacgagaaaagtgcagcttatgaaaagctggtagagcagaagaaagcagaagcactggctgatggtaaggagattgataaggaaggagcaaagagagcagctcttgcacagatggcagttgattctgcgagaatggatcttgcaataagaacaggtaaggctgcagcgagactagagcaggcagcaactgctatagagaatgaagatattcctttagttacagcacagataccaactgtgtcagaatcaatgatttcagatatcaattcaattatgaatgaagatattgataataaagacgataaagaagaaggtgaggaggctgttgtactagatgaggtagctgcaggtgttgagccggaagaaacagtaattccattcaccagacaggaagaagaacagccattgactatggaagaagagattgaagaaactgagcagatagagaagaagcttacaggggagctggcaaagatattcagaaagtacagagatatgccaggacttgaggaacagttagctgatcttttcgatacaattgacgatgaaatgcagatgaattcatcagcatcaggaaatattcttatttctggtaattcaagttctgataagacagaccttgcaagaactataataagagctattaatactttatatccagaccagccaaagaagattgctaagacatcaggagagagtattaaccagagaggtattgccaaggcaatgggaagacttaagggaacagctcttatcgttgaaggcgcaggaacaatccagcctaagagaattaatgaactgcttaactgtcttgaacaggatacaggaagaatgattgtcatatttgaagattcagatacagacatgaatgttcttatcaactttaatcctgagcttaccaagacattcaatcacagaattgttcttaagcagtacacagttaatgagcttgttgagatggcgaagagattcgcaagaaagagacagtatgaggttgatgatgatgcattactggaactgtatcttaagattgacaaacttcataatgtgaatgataatattaaacttgatgatatcaaggaaataatcaatcaggcaattgtcaactctgaaagaagagcatcaagaagattctttggtggacttaagaagaagagaagcgagaatggtgatgttatattcttgacagaggcagattttaaagacagataacttataatattatgcacagatgtgcttacacagggaggaaactatgactaacatcgatgaaatgtcaattaatgcaatcagggtattgtcagcagatgcaatccagaaggctaattcaggacatcctggacttccgcttggaactgcaccaacagcttatgaattgtggactaaccatatgaattacaatccggctgatcctaagtgggagaacagagacagattcgttctttctggcggacatggttcaatgcttctttattcattgttccatttacttggaattggtaatctttcattagatgatgtaaagaatttcagacagatgggttctaagacacctggacatccagagtatggtcatacagttggtgttgaagcaacaacaggacctcttggacagggtatggctatggcagtaggtatggctatggcagaagcacatcttgcgtcagtattcaataaagacggatacaatgtagttgaccattacacatatgtacttggtggggacggatgtatgatggaaggtatttcatcagagtgtttctcacttgcaggaacattaggtctttcaaagcttattgtattctatgattctaacaacatatcaattgagggaagcacagatattgcatttacagaaaatgtaatgaagagatttgaagcatttggcttccagacaatcgaggttgctgatggcaatgatattgaagctatcggtaaagctattgaggaggctaaggctgataaggaaagaccttcacttatcaaggttaatacacttatcggatacggctgtcctgcaaagcagggtaaggcaagcgcacacggtgagcctcttggtattgataatgttgcagcacttaaggaaaatcttaactggccatgcaagggtgattttgaagtaccacaggaagtatatgaccattataaagagatagctgcaagaatggctgaaccggaagaagaatggaataagctttttgctgaatactgtgagaagtttcctgagatgaaggaactctgggataagtactacaatggatgtgatatgtccgatttattcaattctgaggaataccttgcaaagccagagaaggcagaagcaacaagaagttcaagtggaacaattcttaacatgattaagaatgtaatgcctaaccttatcggtggttcggcagatttagcaccatctaataagactaatatgaaggatgcaggagatttctctaaggagaattacgcaggaactaaccttcactttggtgtaagagagcaggctatggcagcaattggtaacggacttgcacttcatggtggattaagaccattcgttgcaacattcttcgtattcagtgattatacaaagccaatggcaagacttacatcacttatgaaactgccacttatatatgtattcacacatgacagtatcggagttggtgaggacggacctacacatgagccaattgagcagcttgcagcattccgctcaatgcctaacttcacagtattcagaccatgtgacagaacagagacagcacttgcatgggaatatgccattgaatctaaggatgagccaacagcattagttcttacaagacagaatcttccacagatggcaggttcatctaaggaagcacttaagggtgcatatattcttgaggattctgataaagagactccagatggaattattattgcaagtggttctgaagttaacctggctgtatctgcaaaggcagagcttaagaatgcaggaatagatgtaagagtagttagtatgccatctatggatgtattcgagaagcagtcagaggaatacaaggaatcagtccttcctaagagtgtaagaaagagagttgcagttgaggcactttcagacttcggctggtacagatatgtaggacttgacggaaaggttatctgcatgaagggcttcggagcttcaggtccggctaaccagttattcgagcatttcggattcactgtagagaatgtagttaacactgttaagagccttttctaagatgatagaataataaagaatattaatataaaaaatcagggatttcggttattaaatataactggaatccctgatttctttatattataaagagttgttaataaaataatttgacatatgtatacaataggtataaaatcaatatgactttttacaatttaaaggaggggaattttgtgaaagcaataaaaagaatttcagtgcttgtgttggcactggtgatggtgtttacattgtgtatgtcatcacagactgcgtatgcagccaacaaagtaacaataacatttaaggactcaatagtgtatgaacaggtggtaagtaatttaagtaatatggatattactaccgatgatgacaagatgcagattactatgaatgaagaagatattaagtctgtaaagtcacttagaataaaggcaccatatggtaagtatgagttcataaaagacatatcagggcttgagaactttacaggtcttacagagctgattatctgggattcatattacaatgatggacaagtaccagaaggtactttttctgatctgtcaccattaaaaggacttacaggacttacaaaacttgaaatacgtggaacacatgcttcaagtgtagatgatattgccggactcactaatctgacatcattaaaaatagaaagtccaaagcatcttgatttatcagcaattggtaatctgactaacctgaaaacattaagtcttgaagcatgtggtatagacaatgaaggatttaactacataactgataagcttacagggttgacatcattagaacttggttatctcaattatgagggaaatgatatatcggatatatcttcaattactaaacttacaaagcttcagacattatatttagataataataatattgcagatattacaccactttcagagttgacagatttagaatttttatctattcgttgtaatctggtaacagatatctctgcacttggaaatcttactaatcttgaaactttatatcttggaagagatactctagggggagttccaattaacggaaatatctctgcacttggaaatcttaccaagcttaggaacttatatgcagcaggttgtggcataacagacataaaagcattagaaccaatagtttctaatcttcaggcacttgatttaacagaaaacagtattacagatttttcgttacttcaggaaaaatatactaataaccagacgtggttaaaaattaataatcaggtatataatcttaaagccaattcagaggatacagttgagctgcctcagattgtattagatgcaatatatgataatacatcatttgtatatacagaacagcttgaaaagaatttgaatttctcaactgtagtgagattagatggttgtaaattttcagaagatggtaaaagtgttattattgataagaatgtagcaacagctaaagcagatataggatatcattgtcatggttacaaatattcggcaaaaattgtatatgatgtaacagatgttagtgcgcctgaagtggaaacatactattctacaaaaaaattaacaaataaagatgttacggttacacttgttgctgatgaagatattcaggctgttgctggatatgataaagtaactgacagggaatatcgtaaggtatatacagccaatgctaatgaaagcgtagatgtctatgatatagcaggaaacaagacagtagtaacagtagatatttctaatattgacaggacagcaccagaggttacagctacatacagtactaaagagctgactaatggaaatgtagaggtaacacttacaaccgatgaagatgtacggtcaatagcaggcttcacaaaggtagatgacagaacttataagaagacatatacatcaaatgcaaaagaagatgtaacagtctatgatatggcaggaaataagacagtagtaacagtagaggttactaatatcgataagattgcaccagaagttacagttgcatacagcacgaaagggctgactaatggaaatgtagaggtaacactcacagccgatgaaaatgtacagtcagtagaaggcttcacaaaggtagatgacagaacttataagaagacatatacatcaaatgcaaaagaagatgtaacagtctatgatatggcaggaaataagacggtagtaacagtagaagtaactaatattgataagacagcaccagaggttgaagctacatacagcacaaaagagctgacaaatggaagtgtagaggtaacactcacagctaacgaagatgttcggtcagtatcaggcttcacaaaggtagacaacagaacttataagaagacatatacatcaaatgcaaaagaagatgtaacagtctatgataaagcaggaaacaagacagtagtaacagtagaagtaactaatattgataagacagcaccggaggttaaagctacatacagcacaaaagagctgacaaatagaaatgtagaagtaacactcacagctaacgaagatgtacagtcagtagaaggcttcacaaaggtagacaacagaacttataagaagacatatgcatcaaatgcaaaagaagatgtaacagtctatgatatagcaggaaataagacagtagtaacagtagaagtaactaatattgataagacagcaccggaggttaaagttacatacagcacaaaagaaataacatatgatgccgtagaagtaacacttacagccaatgaaaatgtacaggcaatagaaggcttcacaaaggtagatgacagaacatacaagaaaacatttgcaaagaatacagacattaatgttgatgtattcgatatagctggcaataagacagtagttaatatctctataacaaatattactgaaaaaccaacagtaccagaagaaccagaaactcctgtaacaccaccaacagaaccggtaacaccagagagtccttcagcagtagaagaaccagcagttgctcctaagactggtgacaacagcatggcagcaatgtatgcaataatcgcaggaatcagtggcgcagttgttttactttctgcaaaaaagaagaagtataacagataatatgaaccaataattataatagcttggatatgaaaccaaaaagttgattatccaagctatttttttatattgtcaagtgcagaatatgccatatattaccgaatgcgccaaaagtgaaagtcaagtgcagaatatgccatatattaccgaatgtgccaaaaataaaagtcaagtgcagaatgcgccaaaaggtgaattgatattgttggggaaaacgattataattatatataataattgtgaaattgtggagtacagttacaaaagggggattttatgagaaagattacagcagggttaattgttataatgtcagttttgcttgtgtcgtgtaaggggaaaacgggtaatacgataaccgtaggaagtgataagcttgataatacgcagtcatacttttctgaaagcatgcatatggtggcaagatgtgatacaggatattattatcttgataaatgtagcgcatcagatgataatcttatgttttatgatgataagtcggaagaaagtattgtgttatgtaataaaccacaatgtgggcatgatggagaagagtgcatggcatatatttcaggaagtgagtttaaaagtgagttgtattactataattcgtacatatatatgataagttccaagggaaatcttgtacagataagtgctgacggaacacagagaacagaccttggaagcatatgcatcctgagtggacaggatagtgtgtcaatgtgcttcaatgatggatatgcatatgtatctcaagagataacgggagatatagaaggtaatgtaacagtaaggctgtacagatttaatcttgatacgggttcgagcgataaaatatatgaagaaacgggatatggtataggaattaattcacttaaaacatatggcagtgacacattttttttaaagacatctgtttcaaaagatgataagggattatattcattggaaggaaaaggaatattcagaattacaggggaagatactgaatgtctgcttgacaagaatgtgtatagttactgtatagatgcagacaataacaagctgtattacagtgggcttggagatggaataatatatgaatatgatcttggcagcggtaagtcagaaagcatatatgaaagtgataatgatacaggatatttttatataacatttgacggaaattatatctggatggatgatgaaggatataagaatatggcaatgtattttaacaaacagagcagttcacttgattatacattatatcagttagacagagatggaaagcttgcagcaaagagaacgattccagacgaggaaaagatattttcaattatgcatggggatagcaggagaatgtttatgttctcatttgtgaataacaaaattgtatatattgataagagtaacattgaaaaaggggatattaaggaacttaggtagatgaaagaactggggagactgcttaatagaaaaacaatattgctaattctggctgcggcatgtatatgtgtcgtggctgtttttgcaggggacttttcagactgtggaatagataattataagattaaagtaagagagtacaactggctgattaatgggcatacagatgaacagatacagcagcatgctgacgaactggcacaggatgatagaagaatatttaagagacttgcaaaggaatacaaggaaaagtctgattatattgatggatatacagaaagtgttaaagcagttattacaaatgcctcgaatatgaaaaaattcagtgtgttcggtacatcagaatcaatagccaatatcaataaaacggaaaatgattataaaaggattgaaaatgtacaggttagggaattaaacagcagggcagttgagcagtttctgaagaatgatatttctatctatatcgttcttgcgttgatgatatatattatttataacatttacgaatacagggataatggaatgtggcagattatctatactgctgtcaatggaagaatgagacttgcagttaaggatactgcagcagtcggattgggtgctttatttgtatcactgattatgcagttatgcggtcttgtctctatgcttgtggtgtatggtggctgggattcccttacagcacctgtacagtgtctgaaagggtataataattttacttatccgataagcgtaatgacatatctttttataagatatatgattatatctttgatagttattgcaatagtgcttgttatatcactcgtatttgcgttatgcaggaaaagaatcagttcgattgtgctggtgggtataattgccggagcggaagcatttgcataccagaatatatcaatgcagggcagattaagaattttcaagaagattaatataataaatgtgatgaatgtaagcaatatacttaggaagtatgataatatcatgatagcaggtgttcctgtgagcatggtaaatgtgctgtgcatggtgtgtattattatagctgtaatatcagcaatatttcttgcgttacttggaaaggttatccgtccgggaagaagtgctggctttataggaaaaatgattgaaaaaatcggacatgtagttcaaaggattttgtccagaattccgcatttctggaaagaaatgtacaaatttttaataacagcaagaggctggattgtaatatgtgttgttgtgtttataacaatatttatatgtaataaccagaaaatagcatattctgaagatgaaaagaaacgtgatgaatattatcagcagtatggtggcagggattacagtggatttaccagtcttatagagcagagacaaaatgatgtttatgaggcacaggcaaagctggatactgcaagagaacagtatgagcggggagaatttagtgaggatgatgtaagcagatatgtgtacaacctcatggatgctgagagactgcttgataacatgagcgaatatatgcagcagattgaatatgtttcacagataaaagagcagtacggaatagatgcgtatgttatgtcacaacggggatacgaccagatatttggcagtaaaggaacaacgagaaaactgcttatatatattatattaggatttggagttgttcttattgcagagactgaaaactcagtggaatataagaacggaatgaatatgcttattggctcgtctaagaaagggagaagatgggaacatacagttaaggcagctgctgtatgcatattggtaggggtaagtgcatttttactgtatataatcgaaatgataataatgtataaggcttatggtatgccatatattaatgcaccgcttataagccttacttatatgaatacagcaaaggtattcaggaatataacaataagccagtatatgcttattctgatggcagaggagatactattcgcagtagcagtcggacttgaaacagtattcgcttcaaggcacatttttaaaaagaattcggggaaaggaatacctctgattatagttattaatactgctatattatgtattattatgtgagggagatgtatgagatttaaacagtttgtaataatgatgatgattatatgtggctgtgtatcagctggatgtaagaataaagaagtacaggagagtgacaagacagcaagtgaaagcagccgtttagccagacaggaggtggagtatcccgaaaaagaagatacatatggagactgggcacaagtgggtgaattcaaaataaacagcaggtctgtagaacaggatgtaaaagatggagatacttcatatctttatataatgggattttcgtggccagtgctgtatgataaagagtctgtaaagtttatagaatacactgcgtataatgcacgtgtgcagtttgaaaagagagaggtgcagcttaaggaattccttgataaaaaggttattaagacgcaaagtaaaaagatatcgggagcagagcaggaagaactggatttaatattgtatatggaatttccaacaagtacatactcatggtatatgaataaacaatcaccagatacggtacgcaaggaaagaaatgacatgcttaacgccatacttatagaggcagaagttatatatgatgatggaacagaggagacttgttattataagattcagactggaacagcagacaattatgtgttgtttgagagaaacttgtagttgaaaataaaagcttttttgaaatgctttacgcattttggcagtgtcaaatagcatatgaaaccagtgcataagttggtaaaaagcctactaatgctgctaaatgagatgaaatagtaggtcttttgagaagaaattttgatgggaattaaggttgctaaagaaaattgcctactaaagttgtgatttatgcgagaatagtaggttttttagctgacaagatgtgactaatattacagatgtatcaggaaaagacctactaaagtgtgagatgtgacatatttagtaggtatttaagatggaaagaagcattataaaccaactgacaatgtaaaaaagacctaccagattgtgaaaattgatgaaatagtaggtttactgggtaactttggaaagcggtaagagtacccccttagggtaataggctgtgtggtgagatgacaggataattactatcagtgatggcaggattgtaagtgataataaaaatatataaatgttcatggaatatttacaaaaaattataataaaatttacttgaattattatacgggcaagcatataataagagcatagggtttgtttataatttaacaatcaaatatttatgtacggaggttttattatggttcgatttactttaccaagagatttgtatcatggaaagggttctttggaagccctcaagacacttgaaggaaagaaagctatcatctgcgttggtggcggatctatgaagcgtaacggtttccttcagaaagcagaggattacctcaaggaagcaggaatggaagttaagcttttcgagggtatcgagtctgatccatcagttgagactgttatgaagggcgctgctgttatgacagagttcgagccagactggattgttgctatcggcggcggttctcctattgatgctgctaaggcaatgtggattaagtatgaatatcctgatacaacatttgaagatatgtgcaaggtattcggtcttcctaagcttcgtaagaaagctcatttctgtgcagtttcatctacatcaggaacagctacagaggtaacagcattctctattattacagattatgagaaaggtattaagtatcctatagcagatttcgagattactcctgatgttgctattgttgatcctgagcttgcagagactatgccggttaagcttgtagcacatacaggtatggacgccatgacacatgcaattgaggcttatgtatcaactgctaactgtgattacacagatccactggcacttcatgctatggagatgattcaggctaacctcgttaaatcatacaacggagatatggcagcaagagattcaatgcataatgcacagtgtcttgcaggtatggcattctctaatgcattacttggtatcgttcattcaatggcacataagactggtgcagcatttgaaggtggacatattatccatggtgcagctaatgctatgtatcttcctaaggttatcaagttcaatgccaaggatgagacagcagctaagagatatgcatttatcgctgatttcttacatcttggtggcaatacacaggatgagaagattgacaatcttatcgctatgttaagaaagatgaatgatgaccttaatattcctcactgcatcaagaattatggtgagggtggtctcccagcagagacaggatttgtatcagaggaagaattcaaggctaagttacacgacatcgcagccaatgctatccttgatgcatgtacaggttctaatccacgtcagccaagtcaggaagagatggagaagcttcttacatgctgctactatgatacagaagttgacttctaataattacatataagaataaatgttaagccttctggtaataatacggttgtattaattatcaggaggctttttattatggcattgaatgaaaaagaaaagactacgattaaggatttacagactcaggagcagacctgtatcaagaagtacaagaagtatggacaggatgctaaagatcctgtgttaaaggagctgttctctacattagagaagaatgagcagaagcactatgacacattaggacagattcttgagggaaaagttcctgaatgtgactgcaacgactgtgagggaaaagagtatgagcctgaggcaacttatgatgtgatgagcaagtcagaggataaggaaagcgatgcatttttagcaacagacagtattggctctgaaaaacttgtatcgggagagtataatactaatgtgtttaattttgccgatacagccatcagaaagattcttgctgatatccagattgaggagcagaatcatgcagaaatgctgtataaatacaagacagtaaacggaatggcataatttatgcaaatttttttgaaaaatgttacaattatttaaacttttttgaaaagtattccgtataaagatatgaacgggacataagactttgatttatgttccgtcagtacataccaaccgggggtgagtagatgggtttgctgtcaaagaaccatgattttagtttgataagcagaatcctgaataataatgacagagatgcagcagacgagctggttacgcaatattataaggctgtgtataagcacatttatattaagctgaaggatgaggagttaagtatggatcttactcaggaaacatttatttcagcgttgaaggggctggggggcttcaatatagagaaggcgtcatttaagacatggcttacaaggattgcagataataaggtcactgattatttcaggagcagacagtatcatgagagtattgttacacagattatggatgataccatacaggaacctgctgatgagagggctggcacggagacgagtgtgcttgggaagctttcttatgaggagatggagaaaatgtatggtcatcaccagaataaggaatgggaaaccttcaggcttaaagtgtatgaaggttatacatttggcgagataagtgctaatcagggggttgatcttagcactgtcaagagcaggtattatgcaatggttaagagagtaagaaaggagtgggattatcttgagtaaggttaagtatccggataaggaaaaaatcagaatacagatagatgaaatccttgacaagtctgaactgtttgatgctacagaagataagtcgtctacatatacgaatgataagatagtacaattgaaaccagtaaaacaacacctgccagtcggaaagtatattggggctgtagcagcaatagcagctattgtcgtatttgttatagcggtaaagaattatcagacagttggcagaggagagcagggaaagacaagtcttgtgccattagcaaccagcagttcagaggcagatatgcatgagagtactgcggaggaagcaacagttaaacagagccagataagtgatatgataattgaagattataacagctatgaaatgttatattcgaaacttaatgttatgagtgaaggaacaataaatattgagaacagaacagagtatggatatacatattctgtaagaaatgacaatgttgcaacaaggaataatgtagtactttatattgatgttccttatgatattaagtataatgataaacagttagatggaatggatgaggcggcagctgatacattaaaacaggtgattcagacgtatattgataagaatggtcttaatagcaatataaagatttcatgttatattatgaataattctcttgagttctatagtggggatactgtatatggaagtctgacgctttctacagaataattggtgcttttgggggattaaatgaacgagaataattattacttaaagaaatctaaagcagttttaagagaggtaaggaagtctgtcattggaaaagatgatgttatatgcaaggtgtatatggcaataatcgcagggggacatgtattattagatgatattccgggagttggtaaaacaacaatggcacatgcatttgcaaatgcactcggacttaagtacaacagaatacagtttacaccagatgttatgccatcggatataacgggattttcgatgtataacaggcagactggcaagtttgaattcaagcagggggcggctatgtgcaacctgcttcttgctgatgaaataaacagaacatcacctaagacacagtcagcgttattgcagataatggaagagtctaaggtgactgttgatggtaatacatatgagcttccagacccatttgtagttatagcaacacagaaccctattggttctattggaacacagaagcttcctgagtcacagctcgacagattcatgataaagctttctatgggatatccacagattgaggatgaagtagcaattatgaagagcagacttgagaacgggaagaatacacagttttctgcatgtgtacttgaaaaaggtgatatagaagggattcgtgaggaagttgcgggtatctatgttgatgattctatatatgaatatgtagctaagattgcagctaagacaagaagcagggagaatataatacagggggtttcaccgagaggaagtatcgcagtaattgcaatggcaaaggcggaagcatttcttcgcggtaataattatgttcttccatcagatattaagaatattgctgttgaaacatttgcacacagaatagttactaatgttaatggagctgcaggtacggaggcagccagaaaagagattactgagatattaagaaatgtaccggttccagagatgaataagtaagggtggcagtatgcttaaaagaaggattttgtattttatctgcctggcagttgttttcggggttaatatattttatgtggaataccagatatttatattgcttgtcctgatgattgcaataccacttgtttcatggattatgtatgctatatcggatgtcagcctggggcttagcctgcaggtcaataagaatgttgtacaggtgggaaacaggattaagataagaatagttaagaagaatgcatgtaatctggcttttgttaatggcagcataaccataaaatatatgtattgccatacgggtgatgaattcatgataaatgtgcctataaaacagggcataagaaagagtgctggaattacggacatttctgcggattactgcggtaatatatgtgtgggggttgaatccatagaaatatgtgactatcttggactttttggaaagaagaaacaatttgcaggagttactaaagtatctgttatgccggaggaaacaactgacagatatatggaagcagacagagctaatgcttattatgatgaagagaatgaggtgtatgtaaagagtgcatctgatgaagtcagtgaactcagagaatacagggatggagacagtccaaggaatatccattggaagagaagcagtatacttgcagagaatgactttattgttaaagagtacagcacgaacattaataagacggtattcatcgttgttgacacggactggagaggagaaaagtcatggcgtctttcaagaatgagccgaatatatgctgagatgatgtcgcaggggctggcatgtgcagaggctggactgactggacagtatatagtgtgggatatggctaaagcagatattgtaagagttacgttctatgataatgccagtttgaaagcggccgttaaagtggttatggatatacgttgtggtgaaggtacggtcaataaagcatgtcaggcattatatgaagatgacaggctggagattacgactgaaccagtgataattacagagaattgataataatgtgacaagagggtattaatgaaaaagggacagcttatacatacagacaacttaatacttagaataatagtgacatttcttggaacatttggtgcagcatccataatagagacgattacatatccgcttgcagatatgggatttattggatttgtttcactgatattcagtgttgtgtatacattgatgctgtcatgttacggaaagaatgcaaggcttataaggattatgggaatggctgttttgccggtggtatatctcgtaattaatataggctcttttattaatggaatcacaacatttataaatgtgtttatatcaagggcatcttttacaggacctgtagatagcagtaatgtactaacggtagagagtgctggtgcggcttctgtaagatgcgtatgtgtggttgttgttatgattatagcagtccttgcagctttagaagttaatgtgtttcctaatatgctagtgagtctggcaataactatgcctctgcttagtgtatttattgcggcagttattattcctgatatcataagcattattttctgtgttctttttatctttgattcaatggcactaaggaataagaagataaaaactaaccagggtgccaaaacggctgtaataatatcagcaattatagcggcagttttaacatttattattcctcaggaaacatataagagaaattctttctttgatgatgcaagaaatatggtaacagatgttgtttatgacagatttggcatagaccttcagggaaataaatcagagacagaggatgataaggcgaaggttaatgcgactgtaggaataggaaatggtgatgttggacaggttgacgaggtctactatggaaatgtatacgcaggagagcttaatacaatgtctgatattggaattgcctatgccagggtatttatgggaagggatttcaagaataacagctggcagcgatggtcggatacaagagaaacacagtatgtttatgagaatgctgtatccgagtttgcacttaatcttgtgaaacgaaaagtatatacgcttgatgaagacgaacaactgcttgctggcagatttttctattatcagcagacattcagaagtaaagacggcaatgtatatggttcgtcacttgattaccgtatagcccggggaagccttgaggattactcacacatggggcagcttatgaagaaatacagaaactctgctattgttaattcatatgaaagctatgcacacgggcagtatcttgatgtatctgaagatgacagaattgttgtagcagaactgtttggaaagaggaatttacagacagtagatgaaaaggttgaatatatacagaaaatagtatcttatcttaaagataattatacatatactcttaaaccaggaagagtcccggagggaaagagcgttgttgagtatttcttaagagaaagcaagagagggtattgtacatattttgctacatcggcagcagttatattaagatgtgcgggtataccggcaaggtattgtgcaggatatacggttaataccaatacaggcgcatattatactgacgggcagagcaataagtatatgaaatatgatgtctacgacaatgcagctcatgcatgggttgaggcatatattgatggatatggatgggttattgttgatgcaacacctggctatggagaagttgaggatactgagcaaagttccacacaggatgaaagtgagagacagagccagtctgacaatagtaattcatcagttgatgaaaatatgacagttgatgatacagatgagccgggtactgaaagtactgcgcaggaagctgtctctgatactgacagcttctcaggtgagatacatattaattcagtactgattgttgtatgtacagcaatgttagcgtttcttatattaattgcaatggctgcaatcaggatagtatcaagaatacatttattaagaagcagttcagtagatgaagtaaagcttatgaaaatgtattcttatcttgaaaagcttcttgcttgtctgggatataagagagaacccggaattgattatgaagaatatatattagaaataactgcacaggatgcgaatcttaagaatatgggacttgagaaagcagtgcagacaatccttgcggtcagatttggtaatgtaaaatgtgttgacaaagctgatataactgggataataaatactataagacaggtgcgaagctacgcacttaagaaagccagaggattgaagaagcttgtagtatgtttaatttagaagaagagcttaagaaactcccggcaaaaccgggagtttatattatgcatgataagtgggacaacataatatatataggtaaggcgaagattttaaagaatcgtgtaagacagtatttccagagcagcaggaataagtctgccaagattgtgcagatggtgtcacatattcagtactttgagtatattatcacagattctgaacttgaggcgcttgttttggagtgcaatcttatcaaggagcacaggcctaagtacaataccatgctaaaggatgacaagagttatccttttattaagattaccgttggtgaagagtatccaagggtactttttgcaagaaagatgaagcatggagcaggtaagtatttcggtccttacacttctgcggcagcagtcaaggacactattgaacttctatgcaaactgtataaggtaagaacctgtaacagaaatctgcctaaagatgagggcaaggacaggccgtgtcttaattatcatatcggacagtgtgatgcaccatgtcagggatatgtaagcggtgaggaatacagaagaagaattgatgaggttgtagctttcttaaatggtgattacaagaagattatggacaggcttacaacgcagatgcaggaagcgtctgagaagatggaatacgaggaagctgcaagatacagagacctgttaatgagtgtcaagcaggttgcacagaagcagaagattacagcagatgatgttaatgacagagatgtcattgcgtgtgcaagtgacggtcaggacgcagttgtgcaggtgttctttatcaggcagggcaagcttcttggaagagatcattttcatatgaaggttgccgaaggtgactctaagagcgacataatttcggaatttatgaaacagtattacggcggaactccatttatacctaatattattatggtgcagtacgagatagaggatgcggatacaatagcacagtggcttagtgcaagaaagagtcgcaaggtaagcattgtcacacctaagaagggcgacaaggaaaagatggttgagcttgcatataagaacgcccagcttgttcttacacaggatgcggagaagattaagcgtgaggagagcaggacaacaggagctatgaaagagattgccggctggcttggacttgggacacttcacagagcagaggcttacgatatatctaatacaaatggcgttgaaagtgttggctcaatggtcgtttttgaggatggaaaaccaaagaagaatgattatcgcaagttcaggataagaacagtaaaggggccggatgattataagagcatgcgtgaggttctgacaagacgttttacaagaggtatgcgtgagcgggaaggactcgaggatagtcatggattctcgagatatccagaccttattatgatggatggcggacgaggccaggtgaatattgcacttgatgtactcaaggaactggggcttaatattcctgtgtgtggtatggtaaaagatgatacccacagcacaagaggtctgtattataacaatattgagataccgatagataagcacagcgagggctttaagctgattacaagggtgcaggatgaggcacacagatttgcaataacttatcacagaagcttaagagataaggcacaggtatcttctgtacttgattcgattgaaggaatcggacctgtaagaagaaaggcacttatgaagcattttcttgatatagaaaagatacggcaggcatcagtggatgagcttatgaaggctgatggtattactgaaaatgtggcagagaatatatacaaattctttcattgataatacttttataatagcatttagagcttgtctgtgataaacttaggatatatgaaatcgtaaacatgagtttggaggcagagaatatatgaataatggtaaagagagggtaaagttatctaaagttatccagaaaatgaatcttgttaatcttacaccacagatagatgtgtcaggaatctggcttaatctgcctgatgtgaacagaccggctttgcagcttacaggtttttatgaccagtttgataatgacagattacagattattggtaatgtggagcatgcttatcttgcgagtctttctgagcaggagagatatgaaagatatatgcagcttttgtcaagtaatattccatgtattatattctgcaggagtataaagccagagcctaagattattgaacttgcggttaagtatcagatacctcttcttatgacagaccaggcaacatcttcatttacagcagaagtaatacgctggctgaaggttcagcttgcaccatgtatcgtaatccatggtgttttagttgatgtatatggtgtaggtgtacttatcacaggtgagtctggtattggtaagagcgaggccgcgcttgaacttataaagagaggacaccgtcttgtaactgacgatgcggttgaaatcagaaaggtcagtgacgagactctggttggaagcgcaccgggagttaccaagtattttatagagcttagaggcattggtattattgatgtcaagacacttttcggtgttgaaagtgttaaggaaactcaggaaattgatatggttatcaagcttgaggactggaataaggacagagagtatgaccgccttggacttgaggaagaatacatagaatatcttggaaataaggttgtgtgccatacgcttccggtaagaccaggacgtaatcttgctgtaattgttgagtcagcagcggtcaaccacagacagaagatgatgggatataatgcagcgaaggaattatacagaagagtacaggaaaatcttatgagaggcggggaggatgacgatgagtaagattatatttggaattgatgttggaggaacaacctgcaaatgtggtacattttctgaagaaggtgagctgttaagaaaagaagagattcctacaagaaaggatgagggtggaagcctgattctgcctgatataagtgagtatatcaagggcgttcttgcagatatgaatatgacaacagaggatgtggcaggaatcggaatgggacttcctggtgcatgtcttgaggatggaactgtcaacaaatgtatcaacttgggctggggagtatttaatgcagccaatgcactgtctgagcttacaggtattcctgttaagattggtaatgatgccaatatggcagcactcggagaattctgggtaggcggtggaagcgaatataacagcatggtaatggtgacaattggaaccggtgtaggcggtggagttattattgatggaaagcctctttatggatttaacggtgcggcaggtgagataggtcatcttccacttgttgaaggtgagactgagagctgtaactgtggaaagaaaggatgtcttgagcaggttgcttctgcaactggaattgtaagaacggctaaccgtatgcttgcagaaagtgacatgccttcatctttaagaagtgtgccatacatatcggcaaaggttatatttgacgaggctaagggaggagatgcccttgctatacaggtaacagagtatgtatgcaggtatcttggaaaaggacttgcatgtgcagcgggaatggttgacccggaggtatttgtaattggtggcggagtttctgccgcaggggaatattttatcaatcttattgataagtattataaggaatgtgtgttccatgcgagcagacagactaagatagttaaggctgctcttggtaatgatgcaggaatgtatggagcagcaaagcttattcttggaaattagtattaaggatagtgagattatatggataataaaatgttatcagaagcattaatatcaatgcttggtgccgggaatgtaagaacaggtgaactaatgaagacacatactacattcagaatcggaggtgctgcagattattatgtaacaccacaggcagaaaagcagatagcagatgttatcgcatttttgaaaaaatcggacattaaatatattgttattggaaatggcagtaatattcttgtgagtgatgaaggcttcaggggagttgtagttgagcttggcgatggtttttcagattatgagtttctgcaggattcacaggataattcagatgaagtgcttgtcaaagcaagtgcaggtatgaagcttacaagacttggcaaccagcttgctgctaatggaattgccggatttgaatttgcaacaggtattccgggttgcataggtggtgctgtaagaatgaatgcaggtgcttatggtggggagttcaaggatattcttgtcagtgcaaaggttattgatgatgaaggtgttatcagggagctttcagcagatgaacttgagcttggatacagaacaagtattgtagcgaaaagcaatatgattgttcttgaagcaactttgaaattaagaaaaggtgaaccggatataataagaaataatatatcagagctggcagctaagagaaggcagaagcagccacttgagtatcctagtgccggaagcacatttaaaagaccggaaggatattttgcagcaaagcttattgaggatgcaggtcttaagggttgtgcaagaggtggcgcacaggtgtctgagaagcatgccggattcgttgtcaataagggcgatgcaactgcgaaggatgtatgcgagcttacggattatattaagagtgaagttatggaaaagttcggtgtcgggctggaactggaagttgtaaaggttggattctaaggcttgttataattaaacagaccagtaattaaggacagataagaaagagaagatgataagatgaagatgattattgttacaggtatgtcaggtgcaggtaaatctacagcacttaatgtattagaagatgagggatattattgtgtcgataatatgccaatctctctgattcctaagtttgcagagcttgccaatgcgggagaagacggatatagcaacatagcaattggtgtagatataagaagtggtcacgcacttgctgagctggattcagtgcttgatgatatgcttaataagcattttaactatacaattctgtttcttgaatcaagtgatgaggtacttgtaaaacgatacaaggaaacgcgaagaacacatccgcttgcaatggatgatcatgacagaatagataatgtaataaagctggaaagagatgagcttaagttcttaaagaaaagagcagatgttatcattgacacaagccagatgcttacaagggaacttaaggcagagcttgagggcatattctttgacgataagaatttcaagaatctgtttgttacagttctttcttttggtttcaaatatggaatacctgcagacgcagatcttgtgtttgatgtgagatttctgcctaatccatattatattgaagaacttaaacaccttaccggtaatgataagcctgtacaggattatgtgaagaaagctccggagacaacagaatttctggaaaagatagatgatttattgaagttccttctgcctaattatgttaaggaaggaaagaacagccttgttattgcaattggctgtacaggaggaaagcatcgttcagttactcttgctaatgaaatctataagcttataagcaggactgagtatggatgcaaggttgagcatagagatattgagaaagattctaagagaaaaggttaagtatgtcgttttcatcagaagtaaaagaagagttagttaagaaaacagattccgcgaggcattgccagattgcggaatttgctgcgtttatgggaatgtctggcaatgtaagcgagacagataatggagaattatgtctggaattcgttacagagaacgaattgtcagttgagaaattcagtgacctgttattgagaatatttagcatcaagatggatgctgatacgaatgaaatggttaagaatggcaaggaaactattataaggataaccaggcagagtgatgttgctaagatattgcagacattaaaatggtgcgacgaccggtttacacagattgaaccggtgtttgttgacgcaagaattgtagcgatggactgctgtaagaaagcatttataagaggagcttttatggaacgaggttctataagtgacccgaacaagttctatcactatgagattgtgtgcaaatatgaggaggacgctgatattcttatggatatgctgcgttttttcggactcgatgccaaggttattgtaagaaaaaacagttttgtagtgtatatgaaagaaggcaataatattactgatacgcttaatcttatgggagcggttgtttcgcagatgaacctgtacaatgtcatgattcttaagggaatcagtaatgatgtcaacagaaaggtaaactgtgagactgctaatcttaacaagacaattgaagcggcggtcaagcagattaaggatattgaacttataagagatactgtcgggcttgacagtttaagtgacagtctgatgcaggttgctcttttaagactcgagaatcctgacatgagtcttcagggattaggtgagctgttagaccccccggttggtaaatcgggtgtaaaccacaggttaagaaagattggcgagaaggcagatgaattaagacagagcatgggaatctctgtctgattaaatatttttaataaaattttacattttcttttcaaatagggattgacaagaagtgtataattgaaaatatgagataaaagagcagtcatatactgcagaaaggttgattaagatgactaaagtagatataatttcaggctttttgggagcaggtaaaacaactcttataagtaagcttttaaaggaagccttaaagggagagcaggtagttcttattgagaatgaattcggtgaaatcggtattgatggaggattccttaaagattctggtgttgagataagagagatgaattcaggatgcatctgctgttcacttgttggtgatttcggaacttctcttaaggaggttgttgataagtatcatccagacagaattattattgagccttcaggagtaggcaagctttcagatgttatcaaagcggttaaagaccttcacattgagaatgaaatcgttcttaacagtgcttcaacagttgcagatgcatctaaggttaaggtatatatgaagaattttggtgaattctttaataaccagattgagcatgcaggaactgttattttaagcagaacacagaatgtttctgaagagaagttaaagacagctattgagcttattaagagtgttaatcctaatgcacatattatcacaactccttgggatgatattgacggaactaagattcttggtgcaatggagaatgttactaaccttgagttagacatgcttgcagaggcagcgcagaaggcttatgaggagcatgagaaggagcaccaccaccaccatcatcatgaagatggagagtgttgctgttgcggcggacatcatgatgatgatgacgagcatgagcatcatcacgaccatgagcatcatcatgaccatgatgaggaacatgagcatcatcacgaccacgagcacgaacatcatcatgaccatgagcatgatcatcaccatcatcatgcagatgacgtatttacaagctggggaacagagactcctaagaagtatgagaaggcagagcttgacagcatattaaagaagctttctgagagtgaagattatggtaaggttctccgttctaagggtatgcttccttgcacagatggaacatggatgtatttcgaccttgtaccagaagaatatgagattcgtgagggaagtgctgatttcacaggaagaatctgtgtaatcggttctgaacttaaggaagatgcacttaaggaactttttgaagtttaatcagtgtttaatagaagaacacatttttacaacgcgtttataatgaaatgatagcgcaaatgcgcggaaatgaggataaatatggcaaatgaggaatatcagattccgattttcttgattaacggtcagcttgacagtggtaaaacaagatttatctccgatactatagcaatgggacagtttgcagacgctaagaataaacttcttattgtgtgtgaagaaggtgaagaggagtatagcgagaagcttcttaaggacaacggagtagatatggttgttgtagagaaggaagattttaatatcaagactcttaatgaactggacaagaagtatgatccatggattgttattgttgaatataacggaatgtgggatcctgcacttattcttggaagtgagaaaccaagaggatggcaggtataccagtctataactttagttgatgccaatgcatttggcttacagtgggctaacatgaagtctattattgcagagtctgttaaatatgctgatatggttatctttaacagatgtaagtcaggtatggaccttggcagctacagaagaagcatgagagcattaaatcctgcacttcagattatcttcgaggacgagaagggtgaccaggttgctatatctgaacagcttccatacgatatcaatgctgatgttattcaggttgatgacgaagattatggtatctggtatatggatgtgtctgaaagaccggaagtatacgcaggcaagaaggtaagattcaaaggacaggttcttaagaacaagtactttaaggataagaatttcgttccgggaagaaaggttatgacatgctgtgcagaagatacacagtttatcggttatatcagcttctacaacaacatagcttctcttgaaaacagagaatggatatgggttacagctactattaagtatgaattccagatggcatataagaagaaaggtcctgttctttacgttgaaagcgtagaaaagacaggtgcacctaaggaagagatggtgttcttctgatatgatacaggatatatggccaaaacatttggacaaccagtataagaatcttaagccaggcaatggggatactgtgttttattttcagggttccttgttgcttgcaagaccatcaggacattttaactcacagaatcctgaagaaaatgtattaatatatccacagtatagtgagttcgttcaggggataaaatcctcttacggagacaaagctgtggataactttgaattcatatatttgttgtcaattgatgaggaacattttttcctcgcaagaaagacaggaagcctcgaaagaggcacattcttgggagagatggctgattcagctgtacacaaggatatgtattctttcgtcagaggatatcaattcataggcgttgattctttccgtaaggcacagccaagagagcatgcttatgcggctattactgcatttcatctgtatggctggtacagggataatcatttctgtggaagatgcggaaaaccactcaggcatgatgacaagcagagaatgttacgttgtgactgctgtaagaatatggtatttcctaagatatgtccggctgttattgttgcagttacagacaaggacagaattcttcttactaaatatgcgggaagaacttacaggaattatgcgcttattgccggattcactgagattggtgaaacaacagaggaaactgtaagcagagaagttatggaagaagtaggtgtgaaggttaaaaatatcacctattataagagccagccttggggactcagcggttctcagcttcttggttacttctgtgagcttgacggtgacgacacaataactcttgaagaagatgagttatcggtcggcacatgggtcaaggcagatgatatagatgtaattgatgaccatatcagtctcacaagggaaatgattgagaaattccgcagtgagcatgtgagtcacaattaattgtaatctttaaagctaatattaagatctatggtattaccactgacaccgtctaacttagctgattcagtgtattgccatatagagaattcatatgggaagtaaggtgtgtctgaatagtaggcaaaccacttctcatatttttctaagcgggtaaggtcaagtcttccaacgaatcccttgaggttggaatatatcattggcttatagcctgctttttctatcttgtcgcagaatgcgattatgatatctgtaagttcttcagtagtcagattctcctgtctgtatgaatcgcccgaaatctcctcaaagtcaataactacaggatatgtaatcttgtaaggcttgataatatcaagaacataatcagcctcttctatagcttcctgtttcgtaattgcagatgagaagaagtatgcgccaatcttaatattattctttattgcgtcttttgcaaatgtatcaaatgaagaatcagtgttcaggattccattgccatagcttctgaaaccacatcttaacatggcaaattcaacgccctgttcttttaatttcttaaagtcaatattcccctgaaacttcgaggcatcaacacccatatgtgttgtaattttaccgtcttcattgtatgtaataattcctttatcatcctgcttgaaattctcatccttataattattcttcgcaagttcaggaagtatctgcgcaaatacatactgattcttattgttcacatagactatattatcagggaaatagctcttaagtatagaaagagaaccttcaccgttagtgaatcttaacttcatatcagaaagaagatcctctttctcttctgactttagtttctcaatctcgtcattgctaagcttatcggtattagttgcaacggttgattttcggtacttaataatgacaccggtggtcagaagaccgaacattacagttgtcataaagaatattaaagttgttatcacaaaaggattggttttcttcgatttcatagtgcatcacctctataataattaattatgagttattcataaaaagtatttcttgtataaatggtatattagcttttgcgaaatgtcaattagaattcatatgattttttaaataaaaatatagaaaaggtattgacaatttattgaatagaatatatagtatctgtacaacacaacaattcttatagaatcagaatccagacgtggataactgagattcttttgcctttgcaagaaggtaattgtaccgtttctgttctgaattaagctggtagatataacagtctatcaggtcaggatcagtaacattatcaagattagaataggcagtgtacatagcctttttagtcatcataagttcctgtaacagatatttttcatcatatgtagcaggattcttttttttaccaaacattttcaatagaattactccttaatgcacaagattagtggcatcatatgcctttattagaagtataggcagtaaatggtaattctatacatgttttttgaggaggtggataagtgccggatattatatcagtcattattgcactggtattagttattgtagcagcagtacatgatttgagagaattcagaataccgaacagacttattgttgcaggtattgttgcgggagtgagtgttattgttataagagcttttacaggcgaatatataggaaattatattcttggaactttggtgggattagcgggaatgatatttctatatataatcagggctgtaggtgcaggagatgtaaagcttttggcagtaattggaatgttgacaggattggattttgtactgcagcttatggctgtatctcttattacagggctttttacgggaattgttgagttgtttttaaaaaagaccagagaggtcagtatggggagcaatggaataaaggcgcatgggtttcattatgcagtgggggttctggctggatatgttgttgtgttggtatacaggtgtgttgtggttttatgaatgatattacataggaggtgaacagatggggaggaataacatttgcgttatatatgactcggacgaaaattatgcgaaacgacttatgtctgtgattaatgatgataatgatattccctataatgcacaggtttttactaaggaacatgaacttgataagtatctgcaggaaaaagaagcggatatgcttatgatatgtgaaggagcatatggttataacgcatatagaacgggaaataagactgttgtgttgtgtgaggaggagcgtgaagcagatgagattaattcaagggaagaaaaaggactggttggaatatgtaagtatcagccgtcatatcagcttctacagtctgtaatgagatatgagaagaaagaccgggttcaaaaaaggggaagccttaaagtgacaggtgtatatgggtttaataatactgcaagaatgatgttgtcactggcagttgcaagactaatgtcagagcatgggaacacactctttattaattttgaaacattttatgggtttaaaggaatcctgaagggggaagagaatgaaaatctttcagatgcattatatgcattcagacaaaatcataatcagtttcataaaaatattgttaatgccataagtcattatgaaaggctggattatataccggatgcgtcctgtgcagaagatattgatgatataaaacctgaagaaatggggacatttattcaggcaataggaagggaacttggatattcgaatattgtaattgatattggggatggaatacgcatgccctggaacatgatggattgttgtgatgaaatatatatgtgtgaaacaggcaattatatagagaatatgaggcttaagaattttgagaaatatcttcttgagcaggggatggataatattgcagcaacttttaaaaatatacatgttaatgaagatgagaacattaataatgatgatatatggggacggctgcctttttgcagtttttatgaagaattatgcagaacagcaggaatagaggaaatgtaatggatgaactctacattaagctaagaaggcatgtatatgaaagactggacattggcagagatgttgctgacagtgaactatatgaggtgatagatgcctgcatatatgatgaaagccgtaataatgtgatttcgataaggcagaaggaagaacttaaacagcgtttatataactctattaaaaaactggatattttgcaggaattacttgaagatgacagcataaccgaaataatggtgaatggcagtgacagtatatttatggagaggaatggttctatagaaagatggaacaaaaaatttgaaagtgagaataaactgtcagatgtggcgcagaggattgcagctatgtcaaaccatatggttaacgaagcatctccaatagctgatacaagacttgaagatggctcgagggtcagtattgttcttccaccggtggcaattaatggaccaataataaccataagaaaattcttcaataagcctatcacaatagaccgacttattgaactggaatctattactccagaagcagcacagtttttagaaaaacttgttaagagcaagtataacattttcatatcaggtggaacaggaagtggaaaaacaacatttttaaatgtgttgtcagattatgtgccagatgatgaaagagtaattacaattgaagattctgctgaactacagcttcacaacattaataatattgtgaggcttgaggcgagggtggcaaattcagagggaactaatgcagtgagtataagagatttgataaaagcaagcctaagaatgcgtccggatcgtattgtagttggagaagtaagaggaccagaggcaatagatatgttacaggctatgaacacaggacatgacggaagtctgtctacaggacatgccaatagtcccaaagatatgctgaccagattggaaacaatggtacttatgggaatggatatgcctgtgtcagcaatcagggcgcagatatcatcagctattgatattattgttcatcttgcaaggctaagggataagagcagaaaggtggttcagattgcagaagtcggagattgcattaatggtgaaattgtacttacgccattgtttaagtttgttgaaaacagtcaggataagcatggaaaagttattggaacgcttgtcaggcagaataacgtgtttaacagaacggagaagcttaaagctgcagggtttagtgaatggtaacgaaaggtacatattagaggggataattattgttctggctgcagcatacattttttatgaaaatgttcttatgtcgtttattctttcaccgtatgtatatattcattacagacagagaataaaggaaaggattgttcatgataagaagaactttaagaagaaatttaaagatggaattattgcagtgtcatttgctttaaatgttggatattcaatagagaatgcattcggacaggctgtagatgaacttactcttatgtatgggggtgattctgatattgttgtaaagttcaaacatatagttataaggcttgggcagaatgagaatcttgaggatatattagatgattttgcggaggaaagtaaagtagaggatatcatgtattttgcggagatattcagatatgccaagagaagtggtggggatttaatggcagttataaagaatacagcacagattatacagcagaaggaagaggttatgtcagaggttgacactattataagtggcaaaaaaatggaacagagagtaatgagtcttatacctgctgttatcgttatatatttaaaggtgactgccaaagaatttatacagcctttgtatggcaatattgctggaataattattatgacagtgtgtctgggggtatatgttatttctgatatgtgggcaaagaggatagttaatattgaagtttaaaaaagaaggaaaggtattattaataattgttattagtgcagctatggctgtaatcagtatgtttatgacggacaattcagataagttgttctgcagtataaagcgtcctgaacctggagaagagtcacaggtgaagaggattaatgtcgtaggtgaagatggagagagcataacatctgttgatgttgaaattgcaccaagaattatgacacaggatgaagctgccggatgttttgaaaaggcgtatgaggagatagctggaattatgtgtgggagaaataaagatcttgaacatgtaactagcaatcttgtattaccagagacagcacagagaggtgtagtttctttgacatggtattcaggaaattatgaacttattaattataatggtaatgttaataatattggtttttcggaaaatgagtgtcagaatgtagaacttaagctgattatggaatatgaggattataaaagtgaatatgattttgcagtaacggtatatgcacgagaatacagtacaggagatagtataaaaatacaggcacaaaaggatatagaagcagctgtcagcagtagcagaatggatgaaaatattaaccttccacagtatatagcagacagcaaagtacactatgaggaaagtgaaaagcctgtgtctccgttattatttgtccttcttggaggggcagctatattagtagtaattatagctgataaaaagaaagtaaaggacaatgctataaagagaaaaaaggaactgttatatgattattcagaagttgtatcgaaattgacattgcttcttggtgctggaatgactacaagaatggcatggcataaaatagcggctgattataaggataacatagaacatggcaaggcggtacgcagacctgtatatgatgagatatgtaagactgattataatattcaggcaggaatatccgaattaaaggcatatgaacaatttggaaaacgatgcgatacgagagaatatatgaagcttgcagcattattgcagactaatatcagaaaagggactaaagagttacggcgtcttcttgaagaggagacggctgatgcatttgaaaaaagaaagaatatggcaaagataaagggtgaagaggctacaactaaactgcttatgccaatgatgatgatgcttatgatagtaatggcaataattatgattcctgcagtatggtcttttcagatttagctggtaattatggaggttaagataatatgaagaatgcgataaaaaagttttgggatagtgaagatggcatgggtgttgtagaggttgtgttgataacaattgttcttgtgggactggttgttgtattcaaaaaacagataacaagtctggttaattcaattctttctaagatgacaaatcaggctaataaaatctgataaatggaggctgttgttgaataataagacatttaaggcgcagataacggtaatggcagcattgtcaatgacaataatattttctttgatatgtacatgtgtcagatcagcattagattgtttttataatacgcagatcaaggaagcgtgcatgttatctgtggaaggcgcattttctgcgtatcataacgatatgttgagtgaatatgatattctgcttcttcaatatagcgataatattaaggcaagaattgaacaatatgctgaagaaaatatatattcctgtgggaaaaatgtttcattaatgggggttgatgtggataatgttgagtacataactgatcagggtggaatatatcttagaaaagaaattgcttcatatatgcaatatggattgttttcagagatggcagatgttatgagacagtcggaaaaggaacttcaaaaagtagaaaaaatcaaggagataacatcggatatacaggattgtgaaaaggatttgtgggaggtggacttaaaaatacttcagctcattaaatatgttgaagggattgagacaacagatacgggaattgtaataagaagtggggaacctgtatcatcagggggatattttgccaaatcggcagttaatgggattgtttcaagggattcagtatatgttgatgagaaaaaagtatacatgagtattgacaactcggaacctggctacacagatgtatcagcattattagatgatatgtatgaagatgcaagtggtgttgcagctagtgaagaaaatcaaaaagaggaagattatattaattcatattcggatgtatataggagaaattatataaagctgaaagctgtacttggaggaactaaagagcagacagagaaagctttagaggtgcttggtgaatatgatgatgcaaagtcgggtgcagagaataaactgggtggatgtatggaaaaggtttctgctgaaataaagactcttggtgaagaactttgtaatgaattaatagaggatcttaagtctatgaaagaagacaatgcgtcagacaagaaaacaatgtgtgatatgcaacaactgagacaggcactttcaagaaatctaattgtgcttaatggggtatgcagtcagattgaaaaacttgaagaaaatcttaattatgacaatagcagagatgttatgtcgtcagtagtcagatgcaggcagttgttatatggattgtccgcaaagggaatgaagtttgattattcaggagtggatttttctatagaatcttccggtctgtctgctgtaaaaaaagtaagacagctgattactgatggcatactggcgttagttatggatacagataatatttcagaaaagtctgttaattatgcaggtcttgcaacagatatgtcagggaaaattgagagtatggaatcaaaggcggaagaaataaaggaacagtttctgatgaatgagtatctgatgatgaagtttaattgttttactgattatcttgatatggatatcgatgaaagtgccggtattgactatacgcttgaatatatactgtgtggaaaaagcggtgataaggaaaatcttgaacagacaatgctggaattatcaggaataagaacgggtatgaatctggcatatcttataacagacaagtcaaaaaaaatgcaggcgtattcatttgcagcaggagcattaggatttacaggtaatatggctcttattaaagccgggcaatatctgataatgtcggtgtgggcatatggtgaagcaataatggatatgagggatttgtatgcaggaaataaagttgctcttgtgaaaaacgaaaaaaactggaaattatcattggaaaatctgttaggtatgaagtttgattccgacaaggatacagacgatgatggtttggaatacagggattatatacgaatgctgcttatgttagaaaggagtgaacataagaattacagaactatgggggcaatggaaattaaaatgataagtatgggacatgatgatttcagaatgagaaattatattgtgagtatggcgggaacagcagtgtttagtgttattaggagaggacagccatacgtacagataataagctgttcttatatttaatatggtttagcggcatatgcttctaaataacggttcgatgcaggaataattacgaagagaggagagcagtcaatgacatactttaaccgaaaattgatgaaaagagacattcctgcatcagcaactgtagagggggctttggttatacctgttatattatatgctgttgcggcagtaatgtttttgttgcagttaatttcaataaggatgcatgtaaatgatgcattatataatgcattaagaaagtttaatacatattcttatacaagtcaggttatgacgggagaaatatataagtctacattttttgctatttttgtagatgaaattggcagcgattatgctaagaaacactatatagcaggcggtaatacagggtggaacttttatggttcagatatagcggatgataattctaccgtgaagatttctttaaaatatactgttaagaatccattcaatatattagggaaaaggcaaattacaatatatgaaaaaagaataactgatatatggttaggagaggaaaaagatggatttgagttaaataacaatgacgaatctgagtatgtttacataacacagtatggtgaagtatatcacatagagaagatgtgtagttatctggtaagaaacataaaagcagcatcgctggctgaaattacagatttaagaaatgcttctggaggaaagtattacccatgtagtttgtgcaagggtgcatcaaaaattgtatactacacagattatggtgataaatatcatgcatctgatagttgttatgcattgcaaagaacaattcttaaagtgaaaaaagaaaaaataaaaggaatggaatgttgcaaaaaatgtatacattcataatccaaagggggtatatgggaagtctgattatgttaacggggctggctataatgtcttttatggatataaagagaagagcagttccagtatatatgataatagtgatgagtattctggcaattggcataaagatagcagaatatatatttggatataagaaagtggatgtttatgaaatgtttattatattggttgttacaacagtatttgttgtgatatgtgtaattagtcatataatgggtgcggctgatgcacttgttatgggaataattgcaattgttacaggcataaaaaaggcaacatcagtattttttatggcattgatgtttgtaagcataatttctggggtactgcttattataaaaagattaaaaagaaaagatacaataccatttataccttttatatttatatcttatgtgggggtgatgatatgtggttaagggcatcatatacagtggaaaatgcggttattacaccattgtttatgttgataattattgttgttatgagagcaagttgtgatatacatgataatctcattcagcgcagcgttaacagtcagtttgttatccagacagaattagggggatttaatgatgaagatacggacatgtatagaataaaaacggaggaatatcttaagagaagagtgattttttcgaaaaaatacaaaatagaaccagaagcatcaattgtaagaacgagttctccagaaaaaactataagaatagtcaatgcacttaaagaacttaagaattaggggaggattaatattggggaaggaaaatattaatataaaatatgagcatcagaacaacagtaattatcttgtgatagaagataatgttgaatatgatgattaccagtacaaaatgcttaggcgcaataaaccagagcattttttaagattctcaatgtattctgttaatggcagatatggaatatattacgacattacatcaagacagcagctgagtaagtattatgaatatgggaaaatgacaatggaggatgttaaatccatatgtgttaatatatctgaaatggtaagaatagcagaagattatatgttagatatagatcacgtgaagatagaacccaggttcatatatatggatgttggaacaaagaagctgcagtttgtgtatcatacaaaggttaatggatatagttttaacgaaagcctcaaaatattgtttgaatttatattggaacattttgatcatagtctggataaggagagtatcgtacaattatatgaagtgtatcagaaggtaattgttggagattatgatccatttaaccttatgagaatgtttgggattaaaaaagtaaaaaaacaggaagaatctgttatacaggatatgccagaaaaacgggataaagaaataaaaactgttatagctgaacagatgatttcggataaagaagaaaaggcagatgaatcagatgttaatataagaagagttattattggtgtagtaagtatggcttttggtctgttaagtatatttgtaccaggattaatacctttcagaattccatctgtcctgagttttgtatgcattggtgccggaataggaatattagtattttgcaaaaaagaacataaaaaactgcagtctgttatacttacgcagaaacagtcaattccatatgttatgaagaaagatacagcacaggtattacataatgagagtgtcaatgtaaacaacaaatgcatagaagaaaaaacggtttcgtatgacgatatatgcaatgagacaatgctgttatctgaatatatgccggaaaagaacagtagaaaagaattaaaacttgtattgcagaaagaaaatcttataggagaagtgcttatatatataagaggggttgagaatgaagacagtataatatgcatggataagtatccatatgtaataggaagttttgaaaagatgtcagatgttgtaataaaagcacaggtagtgagtcgtatgcattgttgtatatatcatgaagcatttaaagatgatgaatatctggttgaggatcttaatgctaccaacggaacatatcttaatggagaacggcttggcaatcatgaacgtaaaaaactttctgatggagatgtgttaaaaattgcagctatatccttcaaggttgaaataagctagattttatgctatattctgactggtatatcacggtaagtgacaatatttattttttgatatatatggggattataagatgaatattaatatatattatggtggaagagggcttgttgatgaccctacaatattagttattaataagatacaggaagttcttgatgagcttaatgtcaatgtgaacagatataatctgtatgagatgaagaatacaataacaacactgtcacagactgttacagaagcagatggtattattcttgcaactacagttgaatgggtaggaatgggaggatatatgcagacatttcttgattcgtgctggctttattctgataagtcacagattttagataagtatatgtttccagttgtaatggcaagaacatatggagaaagggaagtgacacttgcacttaataattcatgggaaattattggtggaaagataggaccggcacttagtgcatatatagatgatactactgattttgagtttaatgataattacaaaataataatagaaaaatatgctgagaatgtatatagaacaatttcacaaagaattatgcagcttccatcaagtagtcagactattaagaacaatatgcttaaggatactattaagcttacaccacaagaaagtgaacagctatcaaaatatgcttctgatgatgcatttgttaagacacagaagcaggatattgaatcgcttgcaagtatatataaggaactccttaatgatcaggaaaatggtggagatgattattatcttaatgtttttagagataattttaatcctacaacaggatataagagtacatatatgatatcaataagtgataaagataagcttataagtatttatgtagatggaagagacataagagtaacattcggagagaataagagtgctgatgtcataggaaagctttcaaaagaaacatttgaccagatagtggaaggtagagagacattccatcgtgcatttatgacaggagcaatgacagcacggggaaaccttaagactctcaggatgttagatgaaatatttaattttcagaaataataggaaaacgtatgcataatattgtttttccgtctgattcagtgagtctggcataaccgttactggataggcatatctgatgtattattgacagaccaactcctatatgaccagattttgttgaatagaaaggtctggatagtttaatgtaatcagataggtatgaagaatcatcgtgtgatggcagacccccattattaataatttctgtgattacataattgttactctttctggttataagggtgatttcaccagtgcagtctgatgcttcacacgcattctggacagcttctgtaagcagggttttgagctggtcaggatttatgagaatatcgggaatattatcaagacagaaggtaaatgtacatgtattatcgattacgtcatcaattatgtctggaacttcatacataatatcgttgatattaactggttttttgtcagcttttttcatgctgtatctgtaaagagttgttctttccatgtgatatataagctgtgacaggacatcttccatacggattatatatttgttttcagacagttcaggagatttcttttttaaaagctggaaactggtttttaaatacgccagatgattctttatatcatgggaatcgatggataattcatcaatagaaaacatagacatgttgtcaaagacagaaatcatgtcgggattttcgtttattaagcaacatagatttctatattcatcatagtttaacattttataagaattcctttcgaacattaatttaataagtttttttctatgaggttgtaattgaaccttctttaagttatcatataaaagtatatacgtattcgaaatacatgtaaacaaaagtatttcgacaaatttcgcgcaaagtgagggaatagtatgaaaaaggatgattgtattttttgcaagctggcaaacggcgagattccaacaaatgctctttatgaggatgatattgtaaaagttattttcgatgcaagtcctgccgctaaaggacatgtacttatattgccgaaggaacattttgacaatatatatgaacttgatgatgacactgccgcacatgtatttaaagtagcagctaagatttctaaagcgtataagaaagcattggattttgatggacttaatattgttcagaacaatggagaagtagcagggcagacagtatttcatttccatatgcatattattcctagaattaaaggtgatacagttaatgttggatgggttccgggaactgcagataatgacactatagcatcaatagtggaaaaagttacaccttatctttaatgtttgtatatgttatataatgaggatatgaataacggatattaagcgggaaaccgtaatgatatatagaaagaggagaaagcatgattaaattaagtgatggaggagcatatcttatcaacggtgtcgatattgttgaggatagtgcttcggctgtgaatgaagtagctgccaagacaggatgttcagtaacaaaggaagaggctgctaagaatactattgcatatggaattcttgaaaaccataacacatctggaaacatggagaagttaaagattaagtttgataagatgacttcacatgatattacatttgttggaattatacagacagcaagagcttcaggtcttgagaaattcccaattccttatgtacttactaactgccataacagtctctgtgcagttggcggaactattaatgaagatgaccatatgtttggccttacatgtgcaaagaaatatggcggaatatatgtaccaccgcatcaggctgtaatccaccagtttgcaagagagatgctggctgaaggtggaaagatgattcttggatcagatagtcatacacgttatggagctcttggaacaatggctatgggtgaaggtggtccagagcttgttaagcagcttcttaataagacttatgatattaacagaccaggagtggttgcaatctacatgacaggagaaccggcaaagggtgttggtcctcaggatgttgcacttgctattattggcgcggtatttggtaatggttatgttaagaataaagttatggagtttgttggacctggtgtttcatcacttagtgctgatttcagaattggcgtagatgttatgacaacagagacaacatgtctttcatctatatggagaacagatgataaggttaaggaattctatgatattcacggaagaagtgagagttacaaggaacttaaccctggaaatgttgcttattacgatggagttgtatatgtcgatttaagcacaatcaagccaatgattgctatgccattccatccaagtaatacatatacaattgaagaacttaatgctaacctcgaggatattcttcatgatgtagagaagaaggctcttgtaagccttgatggacaggttgaatataagcttacagataagattaagaatggcagactttatgttgatcagggaattattgccggatgtgccggtggtggctttgaaaacatatgtgcagcagcagacattcttaaaggaaagtcaattggtgcagatgaatttacacttagcgtatatcctgcaagtacaccaatttatgttgaacttgcaagaaatggaagacttgcagatcttatggagacaggtgcaattgttaagactgcattctgcggaccatgttttggtgcaggagatacacctgctaataatgcattctcaatcagacattcaacaagaaacttccctaacagagaaggttctaaattacagaatggacagatatcatctgttgcacttatggatgcacgttctattgcagcaacagcagctaataagggataccttacagcagctacagatgttgatgtagagttcacaggaccagcataccattttgacagctcaatctatgctaacagagtatttgacagcaagggtgttgcagatccggaacaggaaatccagttcggacctaatatcaaggattggccagagatggttgcacttccagagaaccttattattaaggttgtatctgagatacatgatccggttacaacaacagatgaacttattccatcaggagagacatcatcattcagatctaatcctcttggtcttgctgaatttgcactttcaagaaaggatcctgcatatgtaggacgtgctaaggaagtacagaaggcagagaaggcaagagaagcaggacagtgcatgggagaagctttaccagagctgagagacattatgcataagattaaagaaacatatgatgtgcataagtctaatgttggtgttggaagtactatatttgcagttaaaccgggtgatggttcagcaagagagcaggcagcatcatgccagaaggtacttggcggatgggctaacattgctaatgagtatgcaactaagagataccgttcaaatcttatcaactggggtatgcttccattcataattgataagggagagcttccgtttgagaatggagattatatctttattccagagattcaggatgcaattaagaataaagtatctacaatcaaggcttttgttgttaataaagatatgaaagagttcgaacttaagctggatgaacttacagatgatgagagacagataattcttgatggatgtcttattaattattatcgtgagaacaaataataagatgaaatattagtgtatacggaagttggtgagcagatggcagaacagaatatactgaatggtaatcagaagaagcttgaacagattattggcgacgttaaggaacataatacgaagaaagacagacttgaaaagcttgcggaaagcgttaaagatatttctaaggaattagataacgcgagaaaagaaaaacagaatgaaacggattccaaaattaaagcgagtacagatgctatatgtgccgggtatgataagtcaatagaagctgataaagaaaaaatcaagactgtttctgctgaaagagataaagccaagatggcaggcgttaaagaaagaataagcgcagagacagcatctttaagagcgcagaatgaagatcttaaagatcagattaatgaagcgtttatacatgagaatatctctaaaatatataacagtcagttatttatatcggtgtttaatcccaagcagcttttggattatgtgattgatatagctgtcatggtgggattgtttgtggctgttccaatagttttattcttattgccggtgattccgcaatggattcttcttatatattgtatagctgtatcatttatatgtatggttgttgtaaaggctgtctttagaaagattgtgctgaaacattctgaaactataatggctgcccagagtacaagaacgcagataaaagataacaataagcgtattaagaagattgagaagaacatcagaaaagataagaatgaagatatgtatgggcttgaatcatttgattctcagattaaagcattgtatgatgacatagcggagattgaagatgagaaacagtcagccctggaggattttgaaaagaataccaaggctgatattatctcggagattaatgaacgctatgcagacaaaatatgcaatatggaaactgagcttgaaaagaaaaaagtggagtatgatgaacttgatgatttggttaagaagcagagaatatacatatcatctaattatgaagcgtatcttggtaaagaatttattaatgtagataagctttcagaacttaattctattatgaagtctgactcagcagatacgatagctcaggctcttgctgtatataataatcgtcattaaatgttcttaatgccagaacgatagcatcagctatctggaatataattgacaaacgggttgtctgaagtgtggatgattccatgtcatgggaagagttaactattcctgtgatatgaagatctccaacttcaggcaacttttttttcactccaagaccgggcttaagcggtccgcttcccagagtcatcatgccaatatgatcttcttttccaagagatgcatcaattgcaattataaaaggattatcaaatgttttttgcatagatttaatacagtaattaagatttgcagcatgaacaggctggttaaggtcgccaagcagatagataccaggagaaatgaaatttctaaactgatgacctattataggaccaagactgtcaccagtagagcggtcgcttccaatgcacagaattacaatttcctggtgaggaagaattttttggataaccatatcggtgagtagtcttcccatttgagcgggagctttagggttttttgaatcaaaataataaatcatgagtttgcctccaggtcattttagtagcttagacaggctctttataatgtgtacgcgaaaaagagattaaatattaccaaaaatgtttctgatattttttaaatgaatgacaaaatctgataaattttttcgtaatgtagtgatattattcaaaagagtaataatataaggaggcaccatgatagaaataatatgtaatgaagaaaattcggacaagtcaaaacaagttacaagaggtgcggccataaggagaccgaaaaatattaaacagataggcgaagtgagttctgataagaaaatatatatagaggattatgcttttacatatataaattcaattgcttacaataatccgtcagactcacaggcgggagtactcttgggcgaaaatcagactgatggggatgaaaaatgtgtttttattaagggaataataaaagcaaagctggggacagaagttgaagaaaaaggagtatattttaacgaaagtgtatggaatgggatatattcagatgttgaaaaatattttccggatttatcagtagttggatggtttgcagcaattccagaggttacacctgaaagaatgatgaaattaaagaaaatacatcttgataattttgcaggtacaatgaaaacattttatctgattgatacggttgagaaagaagaaaatttctacttatatgaaaatggtgaacttaagaagcagaaaggatatgtatgcttttatgaaagaaattatgaaatgcaggaatatatgcttgagcggcgtgaaagaaagtcaagtgaagacggaccggataaggttatgaaatcaattcgtaatataataagagaaaaagaggaattacatgaacagaaaaagaatgcaagatttatgtatggagtaagtacttttatggtaattgttattcttgtcattggaattaatctgatgaacaattatcagaaaatgaaaaaatttgacaagtcaataagcagtcttatggttcagatgtcaggaaatgatacagcaacacaagaggaggtagttcctgttaataaacttgaaggtggagtatatcctacagaagcggagacaacaagccagacagctggtacgggtgcagtttctactgagaatgttacggtaacggctgctcaaccggtggaagaacagactgtagctgcaacggtaaatgaagtgaagacatatacagttaaagctggcgacacaattatgggaatatgtaaaaaatattatggtgatacatctaaatgcaatgaagtaattgcatataataatataaaagatgagaattttttatatataggtcagcagataaaacttccttgattaaattccccaatattgtataattaatttaatgcgagatgcaatagaaaaggggaaatatatggcagatataatatctggtaaatccagatttaacggggaccgaaatgctcccgtaaagaaagtgattagtattaacagggaaatggcagcatcaacagaagataatgaagatgttctggatgaagctactgtaaaaagaaaaataaggagacataagagcagggtagcagttgttgttactattataattatagttattctggctgcagtttacatagtatcaagagtaatagataactatgattactcatcttatgaaataaccaattcggtaaatcgagaggatatagaatcttcgaaatatatagcatttgcagatggatatgtaagatatagtaatgatggaatttcctattataagaacagtggcaaggtgatatggaaccagacgtattcgatgcagaatccaaaggtcagcatatgtggtaattctatagctgttgcagatatcaatggaagcagtgcgtattcatttaatacgagtggacaggttggtaaagcagatacatcaatgccgatacttcagatagaagtatcagacagtggaaagatggcagcagtccttgaggataataatgccaattatattaatatgtatgacacaaatggcgagaaaatatacagcgttaaaacgacattgtcaggagatggttatcctatagatataagtatatcatcagatgcgaagaaactaatagcttcgtttataaaagtgagtggagatgagattaaaacaaatgtagtgttttacaatttttccgatgttggaaaaaacgaaacagaaagagttgttggtggctttaattatgacgatattatagttggagatgtaaaatttgtaaatgacacaacagcagttgcggttggtgaaaatgtagtgagcatttataagataaaagaatatccaagtctggaacatactattaatatagataatgaaatacaaaaaatattttgcagcgaccagtacataggtcttgttcttgataattcagaatcgggagatccatataagcttgttgtatataatatatcaggaaaacatatatttgacacaacatttggcatacagtatacagatatgcagtttgacggcaagagcgttgtaatgagtaatgcatcaacatttgtgctcctgaatatgagcggtaagaagctggcagatattagttttgatatgccagtgataaatgttttgccaactggagcaagaggcagctatacaatagttaattcaaaatacatacagtcaataaaactgaaatgataaggaggacggcgaaatgctgttagcaggagtaatacttatactggtaatatttgcacttataggctggagaaaaggtgtaataagacttgttttgtcgctggtatcaatgataataacgataatggcagcggtggtaatagcaccgctggcgactacggcaataaaaaataatactaatatagatgaaaatatagctcagtcaatatatacagttctttatgagaataaagaagtagatgagtattttgaagataaacaggttcttacgggtggcattgatataagtcaggtagaatcacatatacagacagtaacggatgtggtggctgaggtcggggataagattaatctgccagagagtcttacggaagcagttaaggcaatgccagactctgaacttatgtctgtaatcagagaatatggagaagcatctgttaaagaaattactataagattaattgcattcaggttagcggatatagtgttgacagctactgcgtatttagtcataatggtggtggtatcgatagtacttagagttgtagttgcagcgacagggttaataagaagacttccggtaataaaacaggcagacaagctgggcggattaatagtcgggctggtagagggaattgcggttgtatggatattctttaccgttgtgacagcaataagtggaacacaagcagcttctaatatattagtgcagatacatggtaatgcaattttagaatcgttatataattgtaatccaataacaagcttactctttagtacaataagataaaataagggaggatggaaatatgatatgtaaatcatgtggaagagcaaatgaacttggagccagattttgcaaaagttgtggggcaccgttagaaagcaatgaaagtatgcaacagaataacacaaatcagtcagaaaacgtatgccagcagaataatcagtatgttatgccggaaagcatgtattcaggtacaacaagaatgacaaagaaagagtttaatgaatgtgctaatattaaatcaattactaagaatataactgcagcggctataattgcatatgtaattggagctataacattcattgttaatgtagtaatggctggaaatatagcaggtcttgttgatgtcatgattgtggtgggacttgggcttggaatacatttggcaaagagcagagcatgtgccgttattattacagcatattcaatatttaattttatatatatgattcttcttgcaggaatgccaggaggatggcttattatagtttgtggagtatattctattatatatacatttaaatatcagaatgcctggaataaatatcagcagacaggacaaatataatctataataaaaatgacactttattcttgatgtatgcattaagaataaagtgtcatttttatttttgtaacatataatacataaaaattgtaaaaatgtattactatatatagtatgattgaaatggataaatacatatatattgtgataaataccattatgatataaaaaacaaaaaaatagcaaaaaaaattaaaaaagttgttgacaatgtgtacacctgatgatattatatacaagtcgccgcggtaagcggtaacaaataagacttaaaacaccagataaatactgggtttgagcaatacagatctttgataactgaatagaaagacaaccttgaaattctttgagaattttaaaatgattcattaatgaatcttgcgagta

SEQ ID NO: 8495 - DNA, 36581 bp, Unknown
  gut microbiota DNA sequence
aataggtcgagggcttaaccaagagaaaaggttaagacggtttggatagaacaaagagagttattcttaagagtaatcggatgaaagaattttaatgtgcagttttgaaagagcaatatgaaatataatgtattcaggcaggtcgcaggacctgtttttttgtgcgttttcatactaaatgtgggtttgaaaagagtaataatgggtgctacaattagcatagctttgaattaagttaatacatatgaggggagagaatgtatgtatcagtgtcctaattgtggcggacggttaattttcgatatatcgtcacagtcgatgttatgtgagcattgtaatacacattataatccatataatcttggagaaggaaattcggctgaagaaagtaaagagtatgatgttacggtattcaagtgcccgcagtgtggcggtgaaattatgagtacagataatacgattgctgatttctgcagcttctgtggagcagctacagttctggaaagcagaatttccaaagaacttcgtccgggatatattattccgttcagcaaaaccaagcaggattgtaagaatcaatataagaagatgatgaagcgtgcatggtttgcacctaaggaattaaaagatgaaaaatatattgatggtttcaggggaatctatatgccatactgggcttatcatgtatcgcagaaaggtcctgttgtattaagaggagagaaaagcaaaagacggggagattacatttatacggaccattttgatattaacggtgatatggactgtcaatataagggaatatcgtttgatgcgtcatcttcatttgatgataatataagtgaggcgattgcaccgtatgatgttaagaatatggcgggatttacgccggcatttcttagtgggttttatgctgatacggcagatgtcgggtgtgatgtttatatgaatgatgcaattgatatggctggtgaggagacatatgattatgtagccaataatattccgcttggaggtgtatcacttcgtgaaacagaaagtactattaaatccaaatgtaatgcggtgattgagtctgttgacaggacattgtatccagtgtggtttctgtcgtataggaacagagacagagttgcatatgcaacggtcaatggtcagactggaaaagtatcggcagatttaccggtttctattggcagatattttgctgggtcggcacttctggctgttccgatatttatattacttaatatgttcttcacattaagaccgaaggtaacacttaatgttgcagctgtaatagcactgattacaattatattgtatgtgtttgaactgggaaaaataaagagacgggaccagaagcttgatgatagaggctcatgggaagaatcaaagctttccagccgcagatataaagccggaacagataatgataatctggcaaaacagatggctgatggcagaaataatgcaaggattaacagagtaagtaagaaagaaaaaaataaaatggcaccattgttgaaggttgttgttatatttgcaatatgcatggttggaattcctaattttatgtttgctttttctatatttagtgcagtattttcagtgggttcctcttttttcgtcagtgcggcgtgttttgctataggcgttattattacgcttggtaattgcaagacatataaagaagtatcaggaggaaaaaatgtgccgggaagtgtaggcgcacttgtagcattggctgtttcaacactgattctgcttattaatccggtatctgaccttttttattatggtgcagttatatttgtgcttgcttcgttgatgtttacacttgttgagcttattaagtactacaatgtgcttgcaacaagaagactgccacagtttgataattataagggaggtaatgataatgcgtaggaaaataacatttttactgacccttcttgtagcagttctaattatcgcattggcaggaggcagagtatacgctgatacaggctatgaggttgaagattatgctaatcaggatttctgttatgttaatcaggatacaggctatgaagcagtgattgttgatgatgcatttcttttatcagtttctgagaagagcatgctccttgagaagatgaaattaattaccacttatggtaatgttatgtttaactctataagctataacagcacttcgacagagagttatattaagtctctgtacagagaaaaatatggctctgagagtggaacgatattcgttattgatatggataacagaaatatatggatacatagcaatggtgctattaacaggacaattaataaggcatatgcagaaacaattaccgacaatgtgtatacttatgcatctgatgcagactattatatatgtgcgatgaaggtatatgagcaggaatatacgctgcttcagggaagaaagattgtacagccaatgaaatatataagtaacgcattgcttgcgattgttattgcagttgttattaattatataattgtgcgtgtgtattcctcaaagaagaaggcatcaaccaagagccttatgaatggattgtttgagtacagggcatttaataattgtaatgttatatttacacatcagacaaaaacatattctccacgagaatcaagttctggcggttcgtcaggcggaggtggcggaggcggctcatccggcggcggtggaggaagcggcggtggccacagcttctaacaggaagtggaatcagttacagacccaaaaacagcttatatttatcaaaagacagagaaacctttttgagttttctctgtctttttttagtgaaacagtttacaatacatttatatcaaaatgcagtgaggaacttataatgaacagaattctgattgttgaagatgataaagatataagcagggagcttaaggaactgctggaaaattcagggtatgaagcggttgtactgactgattttaaaaatgcatgtgacagtattattgctgcagagcctgacctggtactgcttgatatcaatattccgtatatgaatggggaaatgcttttacagcagttaaggagtaaatcagatgtgccggtaattatggttacaagcagggattccgaggctgacgaggtgctttccatgagttatggggcagacgattatataaccaagccatataatcctacaatactgctcttaagaattaatgcagtatttaagaggattggcgcgaagtcagataatacaacagcttaccgtggaatggaaatacttccgcacaagggtgttattaagtataaggatgatgagataactcttactaaaaatgaaatgacaatattcatgtatctgttatcacacagggagcatatagtttcaagagatgagcttatgactgagctgtggtacaatgaggagtaccttaatgacaatgcgcttactgtgaatataagcaggttaagaggcagatttaaagatattggacttgaagatgttattgagacaagaaagggacagggatatattcttgtatgaggttaggaaaatatattaaagacagactgtattcagtgtgcatatttgtggcaatgcttatcataagcgtacttatgatggcggcattcaaggtgtctgtacagttgataatcgcagaaatatttataatgataatatgctatattgcagttgtgctggcagattattaccacagaaagaagttctatgacgaactggaggctaacatagctgcacttgaagagaaatatcttattacagagacacttgtcaggccggctttctatgaagggcagattttctatgattctgtgagtgacatagacaggtcaatgacggagaatgttaaacgatacaggcagggaatggagcagttcaaagagtatgttgaaatgtggattcatgagataaagcttccgatagcctcacttacactcatgcttcataataacatggataaatgtgataaagaatttgcggacaggatgaatacgcagattcgcagaatcaataactatattgagcagattctttattatgtgagaagcgaaaatgcagaaaaagactatataattaacgatgccagactgtctaagattataagtaatgtagcattaaagaataaggatgatctgcttgaaaatgatatcacatttgaagtgagcaatgcagacaggattgttcttacagatgcaaagtggatggaattcatgcttaaccagatagtgaataacagcataaagtacaaggataagacaaagacagagtcgtatataaagatgtcggcagcagaggataagaaatgtattgttcttgaaatattggataatggaattggtataaatgcgtctgatttgccgagagtttttgacaaatcatttacaggggagaatggaagagagttctccaaggcaacaggaatgggactttatattgtaaagaagctttgtgacaagttaggacatgccataaccattgagtcggtaaagggcgaatatacacgggtgaagattacattttataagaatgatttctataaggagataacagacagcaatgaaagtggcagtatgtgatgacaacagagagttctgtgagaaggaacggacgactataaaagatgtatttaagcagtattttcagggagaagattgtcaggtggatatctacaatgacggtcagacaattattaataattattcagacaatgcttatgatatggtatttcttgaccttgaactgggcgatgagaatggatttgatattgcggaacagatagtattaatgaataatgacgcaattataatatttgttacatctcatgagaatctggtttatgaagcattcagattcagaccgcttgggtatatagttaaagacagatttgaccgtgaatttacaagaatgatggtaaagatagttgataaactgataaagatgaggcaggtaatagaactgggtggagagaaattctatgttgacagggttgtttcaattgcaacgcagaaaaggaagatatgtgtcaaaagtcttaaaggagaaatattattggcagattcatataccaggcatgttgcagaacttgaaaaatatggatttgtgcagtcaagcaagggcgtgcttattaatatgaaatatattaagagcattgatgaagataacgatgtatttgtgatgtataataacgagcgtgttcctataagcaggcgcaggaagaaagatgtcatagaagaatacagaaaattcatgtttgataataacaggtaggaaacaggtatgatggatataattaatatagtgcttacatgtgtattcctgtgtgtaatgaatacaggtgtaatatttattatggacaagataaggaagctgacgggagataatataatacatgtgattaagatggttctgttagtgggtgcaggggcagcagtctatataatgacatattatggaattaatcaatgggtgataatggaactaatgattatcattgccattctgattgtgcagtatatagaacagataacaattaaggtaatactggaaatatcactgataaattgtatcggaatagccatattatctgctaatcaggttgatataatagcaatatgtatcgtatatctgattgtggaattatatatgtttgtagtctatctgtctgcaataattataaaatacagggaattggataatctggaaatgatgttcatacagatatgtgtaagttcagtgctggcgggattattctttagaacaggcatatatgacacatataattatggggtagagaccgctggaatattaattgtgacagttttaacatttgaaataatcggacattggatgcaggacttttttaacaggactgaggagattaataaaagaacggaatatgctaacgaacagtttgaggttgaacgtgtccagaaaatgtatgaagaaagcagaaagttaagacacgaccttaagcagtgcctgacttctgcaattggttatatggatgacaacaattatgataaggcagaagatttcttaaagaatattatgagtgagaaaatcaattcatatgcttatagaaaatactgtgataatagaacgctcaactatattcttaatgataagaatgataaatgtgaaaagcagaatatagcatttacatgtatggtacttggtcaggttggactgattgatgatatagatatgtgtattcttgccggaaatataattgataatgccattgaggcagcagcaaaatgcagtgatccgtatgtcaatgttgagataacaagcaggggtggaatattcatggatgtggagaatcctgttaaagaaacatttcttaacagaaagaatccgttcctgactactaagcttgataagaataatcatggaattggtacgaagagcataagggatattgttgacaaatataatggggaaatcaggtatgaggaaaagaatggaaaagtaacatgtcatatattcctttcaaccaaatatgttaagaaagataaagaataattaccactcgtgcagaaaaacgaccgcttgtgcatatgctcttgaaaagaagtgaatagggaattacattaagactgtacgttgatgaaattcaatgtacagtctttttagtataaggagcagatatgaagaagaaaataaaaagtgcagtaataagtatagtagttatagcagtattattattggcaattctaacaggggttaagaatggagcaatagataagttgacaaaagaaatgccgacacttgcaacaaatcaggcagagacagagaagtcagcagtaaatgtaaaaaatgattctacagaaactaaaccttatgaaggaatagaggttgctgaatatggagaagagtttgaaataaagagagaaatagacataaatcgtaagtatgatgaaaatgatagaactacatataacatatttcatgtaagaattaatgattgcaagatatcgagacagtgtgattttgatattaataagttggattttggattgcagaataagaaagagagtttggatgtaaacaataattttatatcagatttttattatgcaacagtagaattggagataacaaaggatattgatgataatgatgtgatggattatatgaatgtttttcagacgacttggcctatattaaaattgaatagcgatggaacaacacagtcatttaaaactagtgcatgtgttggctctgatgcggaaactaatcaaattggaaaaacaaattttagctttgaaaaaggagaaacaagaacattaatattatattatatattgtcggatgaagaagtcgaaaatgataaacttgttataagttttagtcttaaaaattcaccatttataggtccattagcaattgtacatgaaccagaagcaaattaaataagttttttaaaacaagataattaccacttgtgcaaaaaaacgaccgcttgtgcatatgctcttgaaattaataaatataaaagatacattgaagcagacaggtacttatgtatctgattaaaatctaaggaggatttctttatggatttaaagaaactaacaggaaagctgatgacagtggtcgcagcaggagcaatggtaatgtcaattggtggaggtgtagtgtgggctaataattgcacagacactgaagttaaaatgtcatttaatgaggcagagggagagtatctacattatacaggtggtagaatgaaacaagatacatcttgtggatatataaaaggagaatcctcttctaatgggtattcatttaatgcatcccttgtcggttctgatagatatagtaattattatgaagattttgatttgattgattatgatgtttttccaggtgatgagatatggatgtacaattatgtaaaagaaaatggatacaattatgcagctgttaaatgtgagagtaatacaggaagtgagtattcagtaaaatttttatggagtccagatagtgtttaaagtctgattaaattgtttgtaaaaagaggttgtatatcaggtaatggatatacaatctcttactttgaaaaggaaatatcatgaaaaaaagaataaaaagtgcagtaataagcatagttgttatagcagtattattattgtcaattctaataggtgttaagaatggaacaatagataagctgacaaaagaaatgccaacacttgaaacaaaacaggaacagacagatatacaaaatgaaaatcaaaacaatacaggtaatgattctgcaagagaagaaaacttaagtaaaagagatgtggcatatataggtcagcagtttgaattgagggatgatgatataagatataaatatgatgaaaataatcggaaaacatataatgtattttatatatctgttagaaccgttaatatttccagagaatgcaattttgatgtaaatagaataagatttggactagacgataagaaagatagtgttgatgcagattataattttatatcagattattactatgcaatgatagagttagaggttacaaaagatattaatgataatgatataatattagataatgataatgaattccatacattatggcattctgtaaaactgaatgaagatggtacatataataaaattgaaaattatgaaaatgttggaacaagttcagacaatattcatggaaatgttcatcttgaaaagggagaaactaaaacgataacattatactatcttataacggatgaagaatttgaaaatgaaacattagcgatagatttccattatgagggctcaccgtgtaaaggaacgttagcaatcatacatgaaccgggaggagaaaatgaataaattaattaaaatagaaatggaaagagcatttaagaataagatgcttataatatctgtagtaataggattagttattgttggatttaatatatggaacgagattattcctgcaagaaaaacattagataaactgcttgagatgggaaaatacagcggtatacagcttccgggactatatatgaagtggatgggagtaagaccggggtcttatgtatttctttattactttatcatgccgttgttgacagcattgccatattctataagtatattgatggatgttaaaaagcattatgttaataatatatttacaagaattgataaaaagaagtattacaaagcgaagctttttgcccagtttatagtaggtggttttgtggcaagctttccgcttgttatatcatttgttgtgacagctatgattttgccagcttttaagccagaatcggtcagctcacagtttaatttctcgaaactgtcagtttttggagatttattttttaaagcaccgtttgcaatggctgttatagtatttttatttgcatttgtgggatttggactaattaactgtattgcatacatatttgctgaccttgtaaataacagatttatggtcgcacttacaccattcatgatatatttcttttattatattgtttgttcatctattggaagagatggccctatggaatatctgacagcatccaaactgcgttattctgaactgaaatttatgataattgatatggtgatgttaatagtgctgataacagtatcgtattttgtacgaagcagaagaaaggatgcaatctgatatgaagaagaaaatattaataatagcgttagtatgtatattggcgggagtggcagcgttctatatagttaaagtcaataagatgtatccacagggaagtgtaactgaatatgagcttaatgaatcggttgaattgaatggatattcggcatctgtcagcagttataaggttatgtcaattgaagattttttgaatgagtatggaattgataaaagaaaagacataagtgatgagcaggatgatttatatgtgatggttgctgaatgtactttagatataacgggagagatgaaaggatttccttatgcagatatcagactggcatcgggagctttttcacagggagtatctaatgattatataagagaaattaacaaagatgtcaatttttctaagtttgagcaggggacaagcattactgtagatatacctttccttatccacagcatatcatttcctcacagcataaatgctgataagctgaataaagaagaatggcagttgtatttctcagtaactccgggtaagtatgtgagaatgggtaaataatatgtggaatgaattgagaagaagatatgttaatacagaaatgttgttctggcttgcgggagcagttatttcacaggaagttctgcttacaattttcttaaggtctttacaaagaaatgtgtcgggaacaccgtgtgtattagatgtattgacctgtatgtcacagaattatgtgtttcctcttatgatgattatagcagctgtatgcaatcagagaatgatgaaatgcgacagagatccaatgataattctgaaatacagttcgagagcaggaatatatctgtggcagagtatctgtacgatagtgtattcggcagtgctgtcgttaatatatgaactggctgcaattgcatatgcagcaactaagtttgatgtattttttaactggaacagttattcaagttataaattaatgaatatggatgtattgccggcaggtcaggtaacaggtatgcaggtaatgtttgtttactggatattaatggctttgatgattgcaataacaagttttataggaattatatgcgagattatattttcatcagatgttatatcaggtgcggctgttattatatttgcaggagtagatatatttataccgcttacctatcataaaatgattatattcggggctgcatggtataattctgaagagtgcgccagaaaacttggcatagctgctttaattatggctgttctgattattgcaggtcttattcttcaaagaaagcgtgagtattatgaatacaaaaaagaagatgagtaacaaaagtataagaggcgttatatggcatgatattgaaagaggtttctatgctgacagattcagatatttaattgctgttcttatgcttgccggagtgctgataatattaggaaatcatgaatttggaatgatggatacgatattctttattcagggaggctatgatcctgttcttattattaaggagggaaagattgtatttccttttgtatggatgctgattcagtttcttgtgccattcatgatatacagttattgcaatgatgactgtgaaggcgtagggattgattttcttatgaaatgcagaagcagaagattatggtggaacagtaaatgtctgtggaactgcctgactgtactttctgtatatgcaattcagtatgcaacagcatttgtatatggattatacaatggaaacttgagtatgaaggttaattatgagctttttgaaaagattagtaataagtctgtcccggataatacggcaaatgtgtggattatagtgtatatgcttgtaatgccggttgttgtttctttggtaacagcactggttcagatgacaatctccatgtttacgaatccgatgattggcatgctcgcagttatggcatggaatgttatgtcagtatttataaacaatccgattatgataggaaataattctatggtggtaagaagcagtgtgtataatgcacagagaatacaggtatggcagtcagtcgcagtatgcattgtcgtgtatattgttgtgtatgtggtcggaatgattgggtttaataaaaaagatattcttgtgagggaggattaaaaaatgtatattaaaataacagatgttaataagacaataaagaaagcaccaatattaagggatatcaatctggaattcacaggtggaaaggtatatggattaagaggaaagaatggttcgggaaagactatgcttatgcgtgcaatatgcgggcttattactccggattcaggaataattgatattgatggaaagatacttggaaaagatatatcttttccggaaagtataggcgtgttaattgagaatccttcatttataggtaattatacagggcttaagaatcttaaggtgctgtcatctattcagaacagagtaagcgatgaacagattagaaaggcacttaaggatataggacttgaccctgatgataagagaacttacagaaagtattctctgggaatgaagcagaagttaggaattgcggcagcagttatggaaaatcctgatattattattcttgacgagccgattaatgcacttgatgatgtcagtgttgagaaggttcatgatatattagaagaacagaagaaaagaggagcggtaataattattgcatgtcatgacaaggaagaacttgaccagttatctgatgagataatagagatatcagatggcagaattatcaataaaacctgttaatagtatcattacatagtaccggagtaatgttacaaaattgtaatgttccgtaatattgaacaaacgacaccggattagttaagtggtaaaacataattaatctatatgaaaggaattaattattatggaaacaatacttaagattgataacattgaaaagtattatggaaacaaatcaagccttaccaaagcgattgacaatatttcgtttgaggttggaaagggagaattcgtttctataatgggagcgagtggttcaggaaagacgactcttcttaactgtatatcaacacttgataaggtgactacaggtaagatatatgtcgggggcaatgaaattacccagttaaagggaaataagcttaacaagttcagaagagaggagttaggctttatctttcaggactttaatcttcttgatactttaacagcatttgaaaatattgcactggcgctttctatacagaatgttccggcaagggagattgaattaagagtaagacagactgcaagagagcttggcattgaagatgtattaaacaaatatccttatcagatgtcaggcggacagaagcagagagtggcaagtgcaagagccattattactaatccgaagcttattcttgctgatgagcctacaggagcacttgattcaaggtcatcaaggatgttgcttgagagctttaattttcttaatactgagcttttggcaactattcttatggtaacgcatgatgcatttacagcaagctacgcaggcagagtgatatttatcaaagacggtaaaatcttcaatgagatacgcaaaggtgaatctacaagaaaagaattttttgataaaatcattgatgttgtgacattgttaggaggcgaccttaataatgctctttaagatatcattaaagaacatcaggaagagtttaaaggattataccgtctatttcttcactcttattcttggtgttgcaatattctatgtgtttaatgcaattgacagccagagcgttatgcttgatgtaagagcaaatgtgatggatattatcaagctgatgaatgacatgctttcaggagtaagcgtattcgtatcgtgcatacttggatttctgattatatatgcaagccgttttcttattaaaagacgtaataaggagtttggcatatatcttacacttggaatgagcaagagaaagatttcagtgattcttttctttgagacactgcttatcggcattgtttcacttgtggcagggcttgttattggtacaatcctttcacagtttatgagcgtgattgttgctaatatgtttgatgctgatatgactaagtttaaattcatattctcaatgaaggcatgtatcaagactttaatatattttgcaattatgtatgtgttagttatgatatttaacacattcagtattagcagatgtaagcttattgatcttctaaacgcaggcaaaaaaactgagaaggttactatgaagaaccctgttatatgtacaatagtattcgtcataggtgttggtattctttcttatgcatactggatggttacaaggggtgttgagtcaataaatatcattaataaaataggcgttcctattgcacttggctgtgtcgctacatttttaatattctggtcagtctcaggctttatgataagaatattcacaagtattaagagtgtgtattataaaggggtgaacagctttgtgttaaggcagttctgcagcaagattaacactactgtattctcgacaactgttatatgtatcatgctttttattacaataagcgtgctttctgcagcactttcaatgaaggattcgctttcaaaggatctggacagtatgtgtcctgttgatgtacagcttgcaaaatattcatatgatgcgatgagcgaggcatatgccacatcacagaatatgaatgaaaaagacagggaaatgctggaagattccaaattaagtataatagaaacgcttaataacagtggatttgatgcacagaagtattttaaggatgttgttgaatataatatatacaacaccggattgacagttaaagatacattaggggatattaatacagatgattatcagtttatggcagatgctattatgccggtaatgactattggcgattataattctgttgcaagactgtatggtaatagtacgtatgaacttaatgacgatgaatatattatagtggcagattataagaacatggttatgattaggaatcaggcattaaagaaaggaattatattatctgtcaatggaaaagagtataaaccaagatataatgaatgcaaggatggttttgtaaagattggtgttcagaatatgaatgatgggattcttgttgtgcctgataatgcggtaaaaccacagcaggtacgcaatatggggcttagtgctgactatagggcagacactaaggaagaaagatattctattgaaacacagttagacaatttaatgaaaaatatatcatttaaaaagagcttcattagctggaattccagaattgacctggctgaaagcagtgtcgggcttggagcgttagttacatttattgccttatatttaggaattatattccttataagcagtgcagcaattcttgcgttgagagaattgtcagacagtgcagacaataaggaacgatatggaatgttaaggaagcttggagttgatgagagaatgattgatatggcgctttttaagcagattggaatattcttcgcatttccgctgattctcgcacttatacattctgtgtttggaattaaatttattaacataattcttgcaactatgggaatgagttcaatggcagcatctatcgggcttacgctcgcattcgttgcagttatttatggtggatatttccttataacttatctgtgcagcagaagcattataagacctgtaagataagtttttcattatttcattgtttttttaatatgtttctgttataatcttcacatagaagttgttcgtgaacaacatggaggaatttaatatggaaactaatattttgatagagagtggaactaatgagttagaggttcttgaattcacaatagggaataatcattatggtattaatgttgccaagattaaagagattgtgccatatagtccggttacaccggttccgaatgcacatcctagtgtagaaggaatattcatgccaagagatttaatgataacagttgtagaccttgctaaggttattaaaagtgctccttcaggagatatttcgaaggatatgtttattataactaatttcaacaaattgaatgtcgcttttcatgtacatacagttgttggaatccacagagtatcatgggctgatattattactccggatacaacaataagtactgctgacaatggaattgccacaggaattgttaagattaacggtcagcttattattattcttgattttgaacgtattgtatcagatataagtccggagacaggtcttaagacttctgatattctcaggcttgaaggcagaccaagaagtgaagcacatattgtcatagcagaggattcacctcttcttattaagctgatatctgattcacttgttaaatcaggttatgataatcttacattatgtcataatggtcaggaagcatgggattttatatcagatgccaaggcaggaaaagtaccgcttgatatagactgtgttatcactgatctggagatgccgcttatggatggccacagacttacaaagcttattaagtctgatgacaagttaaagaatataccggttgttatattctcatcacttattaatgaacagatgagagcaaagggagaatcacttggtgcagatgtccagttgtcaaagccggaaatcggactgcttgtatcagaaatcgataaattactcagataattttcttcattttacacttcctcttatgggacgccgcctgacatgggcggcgtccttttttgcgcgggcagcgatgagagaacctatataaagttcacagttgtgcttgcacaaactgtgaactttatataggttctcgaggagcgccgcgacaatgccggaacgcagttctggcatatggctgcccgcgcaaaaaggaatctcgaggagcgcccacatgcaaaatactgaagcgatgacaacattcaaaaaagatgttataatcacatggttatgaaatggaggtacttatgatttataatgatttaattgatgatataaagagtgctgattatgtactttttggtctggggaaagaaatatattcttctgatgatacagagatatatgacaatctgaagaagctgtttgcttctatggaacatgtgaattactttattgtgtctactgataaagctggtacgatcaggaattgtggacttaatgaaagaagaattgtctgtccggtcaatgaaaataatgctgaagaagaggaaaaacagtgggatttctacaataaatggttgtcatcctcacttgcaaagaagctggttattgtggaactgggagaagatttttctaaccctaatgttataagatggccatttgaaagaattgtgatgattaatcagaaggctaagatgtatcgtgttcacagtacattttaccagattcctaaggaaatcggggacagggcatgtgcttttgagatgaatggagcacagtttataaaagaacttgtaaaatgttgttaataatcaatatttatgataatattttagtatattttgattggatgggaggtaagaattttggctgataatgaacagcaggatgattatcttagtaatatgcttaatgcgctgaatgaaaaggaacaggagagccagtcttataatgatccagagacaattgcaaggcaggctaaagagaaacttgaggctgagaatgctgttaaagaggctaatgagccagagcgtgaagctgatgcagacgctaagttagaggcgcttcttgataatactccgctagaagaggcagcggaggcaaagttgacatcagatgataattcagaactttcagatgacgatatgaaaagacttatgaatatgaatcttgatgatattattgatgatgttaagtcagacagtgcgtctatagatgatctgtttggaagttctcctgataaagaaacagaacataatggaaaaagtgctgatactcaggcacagacgattagtgcagatgataagaaaaagttaaaaccacagaaagaaggttttttcaagaagattaagaaagtgttctttgacagtcttgaggatgatacagaaactgcagagagtgcatcagaagctgtgggagagaaagaaagtatagaagagaatgtagtaaaagattcatctgataaaggaaaaacttcatctggaaatgaacctaaagatgagaatgagcagattatagaagatgtgttcggaaacaagagtacgcttgatgagtcacaggttcctaagaaaggcttttttgcaagacttaagtacaggcttgaacagatgaaagcaaagcacattgaagaggagaaggctgaggaagaagctgaaagacttgaagaagaagaaaagcagaagaataaggaattaaagaaagctgcggcagcagagaagaaagagcaaaagaagcaggcaggagaggctaagaaagcacagaaggctaataaacctaagaaggtaaagcctaagagggtaaagaaaccgaaagaaccacctaaaccgcaggatattcttaagataaagcctgtttcgattgttatgcttgtattatttgtggcgggtgtttcggtacttataagtgttttaagttcaggcttttattataacaacagtgtttctcaggctaaagattattacagcaatgagcagtatgagaaggcatatgataagttaagcggaataaagcttaatggcagtgataagactctttatgagcaggcttcaacaattatgtatgttcagaaacaatatgattcatatgagaattatatgaagcttaacatgaagacagaagcacttgacagtcttattaagggagtgaacagatataatagtcttcgtccgcaggcacaggagttaggcattgataataagtttactgctgtatataagcagatagtattggctttacaggatacatttaagatatctgaaacagaagcaataggattatcatcaatgtcagatacagattttactaattattattacagaatagaagaatacggaaaggcagtacaatgatagcaattatcgattatgacgcaggtaacttaaagagtgttgaaaaggctctggtatcattaggagaggaagttttagtctcaagagattcaagtgaaatcttacaagctgataaggttattcttccgggagttggttcatttggtgatgcaatgaacaatcttgataagttcggacttgttgatactattaagaaggtgacaggtaatggaaccccattccttggaatatgtttgggattacagcttttatttaaggaaagtgatgagactccgggggcggagggacttgatattcttccgggaaagatattaaagattcctgctaaggatggtttcaagattccgcatatgggatggaattctcttgatattaagcctgaagcgagactttttaagggacttgaaggtaatccatatgtgtattttgtacattcttattatcttaaggcagcagatgagggaattgtggcagcaactacggagtatattacacatattcatgcttcggttgaaagcggcaatgtgtttgcatgccagttccatcctgaaaagagcagtgatgtaggacttaagatattaaagaattttgcgtcattataattgctaaaaggagttgctgatgtttactaaaagaattataccatgccttgactgcaaggatggaagagttgtcaaaggaactaattttgttgatttaagagatgcaggggatcctgtagaggttgcatcaatgtacgataaatcaggtgcagacgaacttgtatttcttgatattacagcttcaagtgatggaagaaacacaactgttgatcttgtaagaagagtggcagaaagagtgtttattccgtttactgtaggcggtggaatacgaagcacagatgattttaaggtgcttttaagagaaggggctgataagatatcaattaattcggcagctattatgaatccgcagcttatatctgatgcagctgataagtttggaagccagtgtgttgtagttgcaattgacgcaaagaggaatagtgatggtcattggagcatatataagaatggcggaagagttgatatgcatatggatgctgtagaatgggcaatgaaggcagagaagcttggagcaggagagattcttcttacaagtatggactgtgacggaacgaaagccggatatgatattgagcttactaatacaattgcgtcaaatgtatcaatacctgtaattgcttcaggtggtgcaggcagtaaagagcattttcttgatgcatttactaaggggaaagcagatgcagcacttgcagcttcactattccattataaggagcttgatattatggagcttaagaaataccttgcagataatggtattcctatgcgtatgtaggaggatatggatatgtcgatgatagataatgactggcttcctgctattaaggaggaatattccaagccatattacaaggaattatttacatttgttaaggatgaatacagcaaatatgttgtatatcctccggcagatgatatatttaatgcgtttcattttacaccgcttagtaaggttaaggtactgatacttggtcaggatccttatcataatgtacatcaggcacatggactgtctttttcagtacttccgggagaggaagcaccgccttcacttaagaatatatataaagaactgcatgatgactgtggatgttatattcctaataacggatatcttaagaaatgggccgaccagggagtgcttctgcttaacacagtgcttactgtaagagcacatcaggctaattcacatcagggacatggctgggagcagtttacggatgcagttattaatgctgtcaatatgcaggacagacctattgtgtatatgctgtggggctcgcctgcacagaggaaagcatcaatgcttaataatccgaaacatcttattcttaaagcaccacatccgagtccgttatctgcgtacagaggcttttttggctgcagacatttcagccagtgcaatgaatttttaaaggctaatggggtagaaccgattgactggcagattgagaatatataatacacttgattttttaacaaatattatgtattatcaattttgtttattattaaattaaataggagatagtatgttaaaaaagtatttgtatatttttcttatttctatggttccacttattgagcttagaggtgcaattcctgtatcacagggattccaattaccattgttacagtcatatattgtgtgcgtaataggtaatatgcttcctgttccggttatttacctttttgcaagaaaggttcttgagtggggaaaggataagaaatatattggaaagttctttactttctgtattgaaaaaggacacaagggtggagagaagcttaaggagaaggctggaagaggtctttttgtagcattattactttttgttggaattccgcttccgggaacaggtgcatggacgggaacacttgcagcaagttttcttgatatgggatttaagaagagtgtaatagcagttttgttaggagttttacttgcaggagtgattatgggaatcgcaagtgcgggagtatttacagcaatctttagttttgcataagattattaattgacttgaaatccagtatttaagcgcttttttgaaggttttgaaaattttttaaaaaaattcaaaaaagtgcttgacggattccgataattgagttaagatatcattgttgctgcggtacacaactgcaagacaacgaaagctatggcttgttggtcaagaggctaagacgccgccctctcacggcggaatcaggggttcgattcccctacaagctactatatgtgatacggaaagagtgggcagagatgtccactctttcgttcatatataagaaaactgaatatttttagaaagggtgagtactgcatgggaaaaagagaaagctatgaagctaagacaacagaacttatacagccggttgttgaagctaacggcgtggaactttttgatgttgactacgtgaaagaaggcagcgactggtatctgcgtgtctacattgacaaagaaggcggagttactattgatgactgccagaatgtgagcagagctttcaatgagatactggacagggagaattacattgatgaccagtatatatttgaggtgagttctccgggtcttacaagacctcttaagaaagaaaaggattatgaaaagagtattggcagaatgattgagattaaattattcagtcctgttgataaatctaaggaatattccggggttcttaaggaatatgataaagatacggtaacaatcagtattgatgatgtaactaaaacatttgacagaagtaatctggctatgatcagatgggcatttgttgatgaagtataatatatttttggaggaaattaaaagcaatgaataaggaattaattatggcacttgatgctcttgagaaggagaatggaatcgataaagagattatgtttgcagctatcgagaaatctcttatggatgagtacaaggctgagtttgataaggctgataatggtcgtgttgagttagacagaagaacaggcgatttccacatttattctgacagaactgttgttgaggaagttattgttccagagaacagagagaataagaaagaaaaatatgtatcaggtactgatattgcattagaagatgccagaaagattaagcctgactgccagcttggtgatgttattactgttgaagtaaagtctgaggagttctcaagaaaggctgccaagaatgctaagaatactattgtgcagactatcagagagcaggaaaagaatgctctttataatgagtatcattctaaggagaaggaacttattacaggtattgtgcagagagttgctgacaatggtgatcttacaattgatcttggaagactccagacagttcttaaggctgatgacaagttcaaggataagaagtttgcaccaggcgacagaattaagttatatgttgttgatgtaattaacagagaaaagggtggccctgttgtaagagtttcaagaaagtcacaggagcttgttaagaagcttttcgaagaagaagttacagagattaaagacggcgttgttgaaatcatgggtattgcaagagaagccggctcaagaactaagatggcagtaagagctaatgttgctaatgtagatcctgtaggtgcatgtgttggtattaatggtgcaagagttaaagctattgttaatgagcttggtaatgagcagatagatatcattgagtgggacagcaattcagcgcagcttattgttaacgcattaagccctgcaaaggttgtttcagcagtagctgatgatgaagaaaagaaggctaagattgttgtttctgagcagcagctttctttagcaatcggtaagcagggacagaatgtaagacttgctgcaaagcttacaggatatggaattgatattaagagcgaggctgaacctgaagaacatacagaagaagaaaacttagaagaagagtatgttgaaccatctgaaataagccttgatgaagaataattattaggagtgatgcatagtggctacagtaaagaagattccacaaagacagtgtattggctgcggtcagatgaaggataagaaggacttaatccgtattctgaagacacaggatgaatcaattgttatagatgctacaggcaggaagaatggcagaggggcttatatatgtgcgaatgaagactgcctgtctaaagcatttaagaataagggacttgaaaggtcatttaagatggcagtagattctgctgtctatgatgagttagcaaaggagctgaataatattggaaaataaacagaaaatccttaatatgattggacttgcgcagaaagccggaaaggttgcaagcggagagttttcaacagagaaggctgttaaaaccggaaaggcatacacagttattgttgcagatgattcttcagataatactaagaaaatgtttacaaatatgtgtacttattacaaggttccgatacatttttttagtgacaaggtgagtgttggccacgcgataggaaaggaattccgcgcatcactggcagtccttgatgaaggatttgcaaagaccatagaaaaatattttgaacagggtttagaataacagcagtgctgttatttggaaaagaggttaaatggcaaatatgagagtacatgaattggcaaaagaattaaatataacatctaaggatattactgatatgcttagcaacagcgagaagacttataagtctgtaagcggacttacagatgcagaaataacaagtgtgagaaagaagtttgctcctgcacctaaggctgagaataagccggcagcacagccagcaaagcagtcacagcctgtaaagaatgataacagggacaacagacagcagaatcagactccaaagcagtcacagcagggaacacagaataagtctggtaatgctgatgataagaagcatatctcgcaggtatatttcccacagaacagttcaagggataagaatcctagaagagataataataacagagacggacagcgcgataacaacggcggctacagaaataatgaccgtaataatggcggttatagaaataatgaccgtgataataacggcggttatagaaacaacgaccgaggtaataacggttacagaaataatgaccgtaataataacggtggttatggcaaccgtgataacaacggcggctacaggaataacgaccgtaataacaatggcggctacggtaaccgtgataataatggttacagaaataatgaccgtaacaatggcggctatagaaacaatgaccgcaacaacaatggcggttatggcaaccgtgataataatggcggttacagaaataatgatcgtaacaacaatggtggttatggtaatcgtgataataatggcggttatagaaacaatgaccgcaacaataacggcggtttcagaaatgacagaaacggacagtctggaaatggcggtttcagaaaggataatgaccagaaccgtggaggatttaacggaggtcagagaagaaataatgacagaagagattctgcacctaaggaagagtttgatttttcagctaagccagattcaagaagacatgattcaagaatagacagcaagaagaatgacagaaagagagataatgaggctaaggaaaatcttaagttcgctaacagcagatttgataagaagcctatgacaaagcctgagaagaaggaaaaggaagaagagacaatcaagcagcttgttcttccagatactcttactatcaaggaacttgcagataagatgaaggtagctcctgcagcacttgttaagaagctgttcttacagggtaaggttgttactattaacgaagagatagattacgatgcagcagaagagattgctctcgagttcaactgcatatgtgagcatgaagagaaggttgatgttattgcagaacttcttaaggaagatgaagaaccagaggataagcttgttccaagaccaccagttgtctgcgttatgggacacgttgatcatggtaagacttcattacttgatgcaatcagagaaactcatgtgacagctaaggagtcaggcggaatcacacagaagataggtgcttaccaggtaaatgtaaatggtaatcttattacattccttgatactccgggtcatgaagcatttacagctatgagaatgcgtggtgctcaggctacagatattgctattcttgttgtagctgcagatgatggtgtaatgccacagacaattgaggctattaaccatgcaaaggcagcaggtgttgagattattgttgctgtcaataagattgataagcctaatgctaatatcgagaaggttaagcaggagcttactgagtatggtcttattgcagaagactggggtggttctactacatttgttccagtatcagcacatactaagcagggtattgatgagcttcttgatatgattcttcttacagcagaggttaatgaacttaaggctaaccctgacagaaaggcaagaggtattgttattgaggctgagcttgataagggacgtggtcctgtagcatctatccttgtacagaagggtactcttcatgtgggagatgctgtatcagcaggttcttgctatggtaagataagagccatgattgatgataagggtaacagagtaaaggttgccggaccatctactccggttgagattcttggtcttaatgatgttcctaatgcaggtgaaatcattatggctgctgattcagagaaggaagcaagaagtacagcagagacatttatcagtgagggaagaaagaagcttcttgatgatactaagcataaggtatctcttgatgcactctttgaacagattcaggctggtaatatgaaggaacttaatattatcatcaaggctgatgtacagggttctgttgaggctgttaagtcaagtcttgtaagactttctaatgatgaggttgttgttaaggtaattcatggtggtgttggtaatgttaatgaatccgatgtagtacttgcatcagcttctaatgctatcatcattgcatttaacgttaagcctgataatcaggcaagaattgttgcagagagagaaaaggtagatttaagactttacagcgttatctacaatgctattgaagatgttgaggcagcccttaagggtatgcttgagcctatctatgaagaaaagattatcggtcatgcaagaatcatgcagatattcaaggcttcaggagttggtaatattgccggctgtatcgttgaagagggaagaattacaagagattctgttgtccgtataacaagaggaagtgagaaggtttatgaaggacctattgcatctcttaagcacttcaaggatgaggttaaggaaatcaaggcaggtactgagtgtggtatggtatttgaaaagttcaatgatatccagccagaggatatgattgaagcacatatcatggttgaagtgccaagataggatttagtttttatttggagaatatatgcgtaaaaatagtgtgaagaatacccgtattaacggcgaggtattgaaagaattaagtaatataatcagaagtgagattaaagaccctagaatcaaccctatgacttcggttgtagcggttgaggtcgctcctgaccttaagacatgtaaggcatatataagtgttcttggtgatgaaaagtcacagaaggatacgattacaggtcttaagagtgcagaaggatatataagaagacagcttgcaagaactgttaatttaagaaatactcctgaaataagattcattcttgatcagtcaattgagtatggtattaatatgtctaagcttattgatgaagttacagaacatgataataagatgcacgttgaggttgaagacgagacagaataaagaggttagtcatgaatattattgaagaaatcggacatgcaaaggttataggtatcacaggacatatccgtcctgatggtgactgtgttggttcaacattaggtttatataattatatcaggaagaatcttcctgagtgcgaggttactgtttatcttgaaaagccgtcagatgaatttaattatttatctggtgttaatgatattaagtatgaggccgaggataagcattttgatttattcgtagtacttgactgcagttcaatggatagaattgaaccatttatgagctgctttgaaaatgctgataagactatctgcatagaccatcatataagcaataattcatttgctgatgttaattatgtagagccacagtcaagctcggcatgtgaagttctctatacaacatttgacgaggataaggtcgataaaaatgttgcagagtgcatatatacagggataatccatgatactggtgtgtttaagtacagctgtacatcaagaaggacaatggatattgccggaaagatgatggagatgggaattgattattctgatatcattgataacagcttttataagaagagttatatacagaatcagattcttggaagagctttgcttgaaagtgtgttattttatgatggcagatgtatattttcaagtgtatccattgaggaaatgaatttctatggtgtcactggcaaagaacttggtggaattattgagcagttacgcttaacagacggagttgaagtggctatattcctttatgaaacagataaggacgaatacaaagtaagtcttcgttcaaagaaaatgattgatgttgcaagaatcgccacagcatttggcggtggaggacatgtgagggcagcaggattctctgctaagggcaatgtccacagtattgttaataagattggcgaaatgattgagcagcagtataatgaggataatgcatgaatggtgttttaaatgtatataaggagcagggatttacatctcatgatgtagttgcaaagcttcggggaatacttaaaactaaaaaaattggtcatacaggtacacttgaccctgatgcggtcggtgtgcttcctgtgtgtatcggtaaggctacaaagctgtgtgaccttataactgactggggaaagacttatgaggctgtaatgcttcttggaacaacgacagatactcttgatatatcaggaaaaattgttgcccagtcagaggttaatgtgagtgaagtggatgtccttaaagcatgtaatgaattcgtaggtgagtatgaacagataccgcctatgtattcagctttaaagcataatggacagaagctttatgagcttgcaagaaaaggtattgagattgaaagaaaaccaagaactgtccatattaatacattaagggtgaatgatatcaatctttcagataaacagaaaacagttactattactgttgactgctcaaagggaacttatatcaggtcattatgtgatgatataggtaagaagcttgggtgtggcgcatgtatgatgaagcttacaagaacgcgggtaggtgaattcatgcttgatgatacacttacacttaaccagatatcggctcttgtgttaaagggtgaaatagaagacaggataactggcatagataagatattcagtgattatcaggagataacatttgcagaagaatacagccggtatcttcacaatggcaataagctgtcaagagaacagatacctgcagatgctgcaatcagtgataatgagaaatacagagtgtacgattctgataaatgctttatcggtgtatatgaatttcgagatgaagtgctttatccggttaagatattttacgaagacaacaagtaaaggggcgtgatcatctttggaatatattcatggaacagatgattttcaattaaataagaaaagtgcagttacattaggaaaattcgatggaattcatacaggacatcagaagcttattgagattgtaaggcagaaagcagatgaggagaatctgcttgcggttttgtttacttttgacagcctgccgctttcaatatgtccacagaagtatcagcattttatatctacaagcagtgaaagacgcagactgtgtgagaattttggcatagatgttgaaattgaatatccgtttacggaagaattcatgaatatggagcctgaagattttatatgcaggattcttattgataagctgcatgcaaagtatgttgttgtaggtactgattaccgttttggaaaagacagggcaggtgatgcagcaatgcttgtggaagcaggagaagaacttggatttacaactattattgttgaaaaggaaaaatatcaggataaggaaatcagcagtacatatataagagaagaattaaaggttggccatatggaaacggtaaatgttcttcttaacagaccgtttaatgttacaggtgtggtttcgataggaaaccagcttggacggaagcttgatttccctactattaacatatatccgacggagtataagctcctgccacctaatggagtatatgctacccagacgactattgatggtgaaaaattctacggggttactaacttaggaactaagcctacagtaagtgatgcaccggagataagtgttgagacatttctttttgattttgacaaggatgtgtatggcaagaaggttgatgttgaattcatacattttataagaccagagatgaagtttgaagatgtagaagggttgaagagacagattgcggcagattcggattttgcaagaaatatgtttcttattggataattaatacttgcaaaggtttaatgcctgtgttacaataatcgagtatgagccgtcacccagctgtaggacactccgacctgaagcttagtggcaggagattaatatttaggaggatttagacatgatatctaaggaaaagaaagcagaaatcattgctacttatggaagaaagccaggagacacaggttctccagaagttcaggtagctatcttaacagaaagaatcgctgagttaacagaacatcttaaggttaaccagaaggatcaccactcaagaagaggtcttcttaagatggttggtaagagaagagctttacttgcatatcttaaggatacagatattgaatcttacagaaatcttattgagcgtttaggcttaagaaagtaattaatcagggcggagtgtataactccgccctattgcgttgttaatggcagaagggataccccgagaccactgaaatgtataccatggcggtagtttatggtgtgtttttcagttgtttcggaccttctgttaaatatatattttttatggaaggagttcatatgtttaaacagtatgaaatggaactcgccggaagaactttaagagttgatatcggcagagtgtgtgcacaggctaacggtgctgcattaatgcattatggtgatactgttgttctttcaacagcaacagcatctaaagaaccaagagaaggaattgatttcttcccattaagcgttgaatatgaagagaagatgtatgcagcaggaaagattcctggtggatttaacaagagagaaggtaaggcatctgagaatgctatccttacatcaagagttatcgacagacctatgagaccattattccctaaggactatcgtaatgatgttactcttaataacatggttatgtcagttgatgagaattgcagaccagaattacttgctatgattggttctgctattgcaacatctatttctgatattccatttgacggtccatgtgctacaacacagattggtatgattgatggagaatttatcgttaacccatctcaggcacagtggcaggatggagatcttcagcttacagttgcttcaactaagcagaaggttattatgattgaagcaggagctaatgagattccagaagacaagatgattgaggctatatataaggctcatgatatcaaccagacaatcattgcatttattgataagattgttgctgaggttggcaaggaaaagcattcttatgtaagctgtgctgttcctgcagagatgtttgaggctatgaagcaggttgtatctccagaagagatggaagttgctgtattcacagatgacaagcagacaagagagaagaatattgatgctgtaactgagaagatgaaggaagcatttgtagataatgaggaatggcttgcagttcttggtgaagctgtttaccagtaccagaagaagactgttcgtaagatgatcttaaaggatcacaagagaccggacggaagagctattaaccagatcagaccacttgcagctgaggttgatattattcctagagttcatggttctgcaatgtttacaagaggacagacacagatctgtgatgttgttactcttgcacctttatcagaggcacagaaggttgatggtcttgatgagaatgtaactactaagagatacatacatcactataatttcccttcatactctgtaggtgagactaagccatcaagaggaccaggacgtcgtgaaattggacatggagcattagctgagaaggcacttgttcctgttcttccatcagaggaagagttcccatatgcaatccgtgccgtttctgagacatttgaatctaatggttctacatcaatggcttcaacatgtgcatcttgtatgtcacttatggcagcaggtgttcctattaagagaatggtagccggtatttcatgtggtcttgttacaggcgagacagatgatgattatattgtacttactgatattcagggacttgaagatttctttggagatatggatttcaaggtaacaggtacaacagaaggtattacagctatccagatggatattaagattcatggtcttacaagaccaatcgttgaagaggctataagaagaacaagagaagcaagacttttcatcatggatacatgtatgaagcctgctattgctgagcctagaaagactgttggtgagtatgcgcctaagattatccagacatctattgaccctgctaagattggcgaagtagttggacagcgtggtaagacaatcaacgcaatcattgatgagtgcggtgtcaagattgatattactgatgatggattcgtttctgtatgtggtgttgagcaggcaggaatggataaggctatgaagtatatcaagactattgtagaagacttcgaagaaggcaagatatatgaaggtaaggttgtaagcattaaggaattcggtgcattcgtagagtttgctcctggcaaggaaggaatggttcacatttctaagatttctaatgagagaatcaaccatgttgaagatgttcttacacttggcgatcatgtaaagtgcaagtgtatgggtaaggataagatgggaagaatcagcttctctatcaaggatgcaatttaattaatatgagagcatattaattaaatacgggtttgaacagattgtatctgttcaaacccggcaatatagaagcatgagttatatttggttatagaaaagaggatacgattatggtagatcagaattgtgcatattgtgtagagggtgacctcgtagctaagtttggtattaagatatgtgagcttgagacatcaaaggtatatctgttcaaggagcagagccatcctggaagatgtatcgtagcacataagaagcatgttggtgatatgaacgagttaactgcagaagagagagctgcttactttgaggatgttgcaagagtagcaagagctatcatggctgctttccacccagataaggttaactatggtgcatatggtgatacaggtcatcaccttcatttccatctctgccctaagtataaggacgagttcgaatggggtggcgtattccttatgaacccagataagaagtatcttacagatgctgaatatgcagagatgattgagaagattaaagctaatatgtaactgttcagagccaggcagaatttcataaatcagattagaaatgcttgcatttctatatctgattttgaaattctatctggcggatacgccacacctccaaaatgcgaagcattttggaggctggctctgaatagttacaacaataatttgaaatgaggtatttttatgtcaggacattcaaaatttgcgaatatcgcgcataagaaggcagccaatgatgcagctaagggtaaaatctttacaagacttggtaaggagcttatgatagctgttaaagaaggcggtccggatgttaataataacagtaagttaagacaggttgttgctaagtgtaaagcagctaatatgcctaatgatacaattgacagagctattaagaaggctgcaagtaatgatatgtctaactatgaatcagttacatatgaaggatatggtcctaacggaacagctattatcgtagaggctcttactgataacagaaacagagcagcttctaatatccgtagtgcattcactaagggtggcggtaatgttggtactccaggctgtgtatcattcatgtttgataacaagggacagatgattgtagacaaggaagaatataccggagatgctgatgagcttatgatgttagctcttgacgctggtgcagatgatttcaatgaagaagaggattgttatgaaatccttacttcaccagaggagtttgatgctgttaatcaggcattagctgatgccggagtaacatttgcttcagcagaggttactatgattccacagacaactgtagaccttacatctgaggatgatattaagaagatgaacagaatcttaggacttttagatgaagatgatgatgttcagaatgtatatcataactggaatgaaccagaagaagatgaagaataattaatcatgaaagaagattctcatgcaagtttggcatgagagtctttttttattgttgtaaatgtgttatcattatatcattaattgcgtgtaatggagaataactatgcttttacaggacatacccgaggataataacctggtaattgaattaagtatgaatggacagaaatatgagtttccatcgaaggttatcagaaaagttaaccaaagcgtattggttgagccaataagaattaatggaaagatattaagctttaattcttcaggtggcggtattatggtaagtgtatatatgataagggacagtaagccaccaatgttatggaagggcgttgcggttaattcaataagagaagataatggaacattttataagattacagctaatggagaaggctttgaagttaacagacgaggggctttcaggctgtttataggtatctcgggagttgcacagttagggactaaccgtaaggcagttgatgttattgttaaagatgtgagtgagagtggattctcttttgttggcatggaggatatggacaatgtcattaatatgccggtaagacttgtatttgctgactttaatcagaattatagtcttatggggattattgtgaggaaggttgttatcggtgagaacaagatagtatacggatgcaggttaggcgtgcgtaatgctaaccttgaacagtatataagccagaagcagagacagatgttatcaatgaaccatggcaattctgcatttcagaataaggagatactggagaaagctcttaaggaaccgggcagggcagacaggacagcacaggaacaagaaccggatgataagaattataagaaaaagcagattaagaatgacggaacatataaagaaagagatattaataaagttggtaaaactgaaagaagagatatattcagagatacacttgaaagaaagaaggtatgattatgaaacctactttaaggcagattgaggaaagagaaaagcagaaaaaggaaaagcgccagattgatacactgattaaatatgaccgtgccaagatatgtccaaagtgtggtgaacttatgcgttatgcatttggagaagtgtttaagtgtgacaactgtggagcagaggaaatgacatcttttggcaaagtgaggaaatatatagaagaccatggtccttctaatgcagctaatatatcagatggaacaggggttcctgtatcaacaattaacagatatctgagagaaggaagaatagagattcctgacggttcggacagctatatcaaatgtgaggactgcggagcagagataagatacggaagatattgtccggcatgtgcagcaaagcataataaaggtcagaatgtcggtatatttaattctgaagcaggagaagttccgaagcataagagagatgcatatggtaagatgcatactcttgatgtaatggagaagacaaggaataaaagataataacaatataataatgaaagaacagtaacagcccgttggttaagagattaaccagcgggcttttttcatagatacacataataaggataaatgaggagaataaaatgaagaaaatgtttattacagagagaagcatagaagaatacaggaaaatacttgtaagggaagaaaagggcaggcttactgttgagaagtatgtaagagatatgaaaaaattctatgaatatgctgcggggaaatgtataagtaagcagttggttattgactataagtattatcttgaaagcacaggtgattataaaatatcaagtatcaattcatttctggcatctgttaatcattatcttgaagttatggattgtgcagatatgaaagtgaagatgataaaggtacagaaaaatatgtttgccacagaggaacgcgaacttacgaaaggtgaatatgaatgtcttattgatacagctgtttctatgggaaatgaacagcttgcacttattatacagactctggggagtaccggaataaggataagtgaacttaaagcagtaactttggaatctgtaatcaggggcgtagcagatattcataacaaaggaaaattaagaagaatattatatccgtcagaattaagaaatgcactcataagatatgcagacagacatggaatagtgcggggcagcatattcattacaagaaccggaagacctttaaacaggtgcaacatctggaaaatgatgaagcagttaagtgtggcagcaggaatagacccatcaaaagtatttccgcataatatgagacatctgtttgcccgaagcttctacaatattaaaaaggacatagcacgtcttgcggatgtgcttggtcacagcaatattgagacaacccgtatatatgtgaaatcatcaggggaagaacatagaaagctgctggacagtatgaagatggttataaaaagtgattatataattaaaaaagtggtggatagaaaatgttttgtaaaaagtacaacataataaatattatgttgtaaat

SEQ ID NO: 8496 - DNA, 68672 bp, Unknown
  gut microbiota DNA sequence
agagaaaaggttaagacggtttggatagaacaaagagagttattcttaagagtaatcggatgaaaaagtatttgcaaagacagatacgatatgatatatttagtatgcagttttgaaggagcaatccttttaaaagtaagctgctatgtggcttacattttttcacataatggaaacattagtgataatcctcgatagctcaatggtagagcactcggctgttaaccgagttgttgtaggttcgagccctactcggggagctaagaataagtggcatgcacttgcccatgaattctttattacggctccatggtcaagcggttaagacaccaccctttcacggtggtatcaggggttcaaatccccttggagtcatttattaataataaggcgacatagccaagtggtaaggcgtgggtctgcaacaccctgatcaccagttcgaatctggttgtcgcctctgtaagctttaatccgtcagggttaaagctttttttaatatatacgatacgtgaagatgccagaaatggagattaatattatgaaggtattaatatttacaacaagacaactatgctataacagtggatattattttgcacacagaattggtgaagaaattgaaaaacttgggattgagtgtgaatattgcgaaatacctgagaatgcaatcccatcggcaggaacacagattgcacagccagctatagagaatgcagggaaaagtgtagatgaagaagctgagaaaatgctggagagttatattggaaaggaatatctggcaatactagattttaattctaaacttccaagacttgttcttgatgatgaatcttattatcttgatagcatagatgctcctttttataattttattctggatcacccactgtatcatcattcaacacttgattgtaagttgaagaattattatgcattttcaatagatgaaaatcactgtaaatatatacagaatttttatccacatataaaagctgtatatcaggttgcactaggtgcagaaaatgttatctctctagaaaatctccaggagaaaaagaaaaacatacttattatggggacatataggaatcccgatatttatatgaaacagatatataatatgaataagtatgcagaaaaaaatatgcttgtaatgttagaaaagcttgaaaatgacaatgaaatgactgttgaaaatgcacttaaatgtataataaacaattcaaatctcgaaaaagacagttttccattaattcttaataaatattatctggtagaaatgtattacagaaattattatagaaagaaaatggtcgacgctcttgtcaatacaggatttcatatagatatagcaggggaatggtgggaaagttatgataaaattaatagtcctaatgtgatatggaataaagcagtaagatttgataagtcatatgaattgatagcaggatatagggcaatggcagattcatcaccgttttttaagggtggagtgcatgacagggtatatgcaggaattgctaattatactgcagttatgactgactataatgattatagaaatagatgtctgcaagatattgtacagatgtatggtcaagaatgcaattatgaggaaatatgtcagaaaactgatatgatgatgaataatgatacattttataaagaaatgacacagaaagcatatgaagaatatatgaataattatacatggaagtcagttgcaaaaagaattattaaacattttctttctgaataataatatgtatgttataattgtaaaaaatgtgcagtatggagggtataatgaaagaacttggaaaatgcagggctgtgattgctttattattttttactgcaacagtttttagtggttgcgggaatagaactgaagctgtaatcacagatggagaggatattacaacagtaagtgctgaatatcccacattagaagaaagtcatgcagatatatttacctataaagatttaaaaattggaaatatttcttatcttatgactgaatcccaggttatagcaattttaggaaaaccaaaagaggaaacggagaatgatggtgagaagatttattcatataatgagatgtcaataggtttcgaaaaactcgatgataataacagacctagcggcagtggtgtttacaaggtaacacaggcagcatcaataggaagtgatgataagttttcgagaaatatgcgtgtaggacaatcagcagatgatattttaaaaatgtattatagagatgcagattatcagaatcatctttatatgtctgaagacaaaacacttacttatggaaagctgctctatggtgattttacaatagcagagcttgacaaggttaatacaaaagaaacagttgcatatggactggttaattataatggatatagtaatctggaaacggcagatagctataatattgaatttacatatgttgatggtaaatataaaggtgacagggcaacggttgatgatgattttgccacacttaattttgaaatagataacaatggtaagataacagcaatttcgtggttctattatccggaacagaattgatatgaggaggacgattatgaagaaatttgcaagatgcatattaatactaatattagttgccatacttagtggagttggaggttatatatatgaaaataatactatgactccgatgtatgaatcagtagcaaagctttatgtagtaccaggttcacagaatgaggcatctataagagctaagaatggtggtttgaatcatgattttatgattattttctcaagcaaggttgtaattgagtcagcacagagattagctggaacttcggaggatatttcggaatatctcacagtttcatcacctgctgacagtaatattgttgaacttaaagttgttaatcccgaccagaatacagctaaggcttatgttgatgctgttgctaaaactgcagttaagaccacaactattattccagtagagtcaatgcagattctttctgaaggaacaagtgatggcgtagcaacaaaaccagatttgtattattacacagctttaattatgggagcagcatgcgcagtatgtgtatttattgaaattgttgtgtgtcttattctgtgtgcattcaagaagaaggaagaccatagtgatgatgaatttgaatatgaagccagatttggaagatatgcatatccaagaagggaatatatagaaacagaggcagattcaacaaagagaattgttaatgataataagagaaaagccagctctgatgatattctggcagcatttgatgatgatgacgatgatgagtatgatgattcttttttatatcagtcatctgataatagtaatgcaaatgtggctgaatcagaaaaaacaccagaagctcctgttatggaatctgaagaaattcttgaagaagcagtaaaagaggccgcagcgacaaaggaagaatataagccagagccagttgtagaagcggaaccgatacaggaggctgcacctgtagtagaagaacctatactagagaaacaggatgaaccaacattagttgatgaggagccagctcagattgtagttgatacaccagtagaagaagaacagccggaagaggaagtgacaccggtagaagaagaacagccagaagaggaagtgacaccggtagaagaagaacatccggaagaggaagtgaaaccggtagaagaagaacagccggaagagaaagcagaaccggtagaagaagaacaacaagcggtagaagaagtggaaccggcaagcaaaattgtaattctaggaagaatatataagtaatacaggagaggaggagaaatatgttcagcgtaaatatagataagattgtcggaatgacagataatgagaaaaaatgttatgaagaacttagagaaaatttaaagaaagagttgaatggcgggaaagtccttgctattacaaagaatggcataggagcatttaaaattgcatatagttttgtatgtgcaggagaaaaagttctctttatcgatgctgatattatgtcagagatttttcttggaaaatataaacttggaaagaatctgaaaggtgtagcagattttttaaaaaaaccttctcaaatgtatgatttgatatgtaagacgaataatcctcagtttgacattatatttaccggagtattagatgatggtgtgatatcagaagatgaagaatcaatgatgaaacagtttatagatatgtattctgataaatatgacagaatagtgttaagctcagatgtagacggaagaatagcaaaatattgtgatggaactgttatcatgtacgaggaaagcgagttcggtgaattatcagcagagaattatgttgatgaacttgagaacaataaatgtaatgttctgggtgtggtaattaatggataatattgataaatttgtgcaattagtgcaggagagtgacaatattgtatttttcggtggggcgggagtatctaccgagagtgggattcctgatttcagaagtccagatggattatataatcagaaatacaaatatccaccggaaacaattatcagtcattccttttatcagaggcatccagaggaattttacagattctataaggataagatgttatatcctgacgcaaagccaggaattacacatctggcattggcaaggcttgaaaaagaaggaaagctgaaagcggttattacacaaaatattgatggacttcatcagaaagctggaagcagtaatgtaatagaactgcatggctcggtgcttagaaattattgtgaaagatgccataagttttatggtattgacaagataattaattctgaaggtgttccaatgtgtgactgctgtggaagaataaaacctgatgttgtattatatgaagaaggtcttgatgataataatataacaaatgctgtgaattatataagacatgctgatatacttataataggaggaacatctcttggggtatatccagcggcaggacttatagattattacaggggagacaaactggttcttattaataaatcagcaactccttatgacaacagggctgatattcttattaatgagccgcttgcagatgtatttaagaattttatgtaattaatatataacggagattgtgaatggcgggtattatttcatacgaaactggtgatattgtagaaatgaaaaaaaaacacccatgtggcagcaacgaatgggaaattctcaaggctggtgcagacattaaaatgaagtgcatgggttgcggtcatgaagttattattaaaagatcactggtacaaaaaaatacaaaaaaattaaaaaaggcttgtaattaacttctggatatgataagattttgtcttgtgatatatttttaatccttgttccttcatttacatttatatgtataaggatagaagggaccaaaagaccagaaggaggtgcgacgtagatgaataagtatgaattagcattagttgttagcgcaaacgtcgaggatgaagtaagaacagctactatcgagaaggttaatgagttaattactcgtttcggtggtactattacagatccaggcacaagcgagaagaagaagcttgcatacgatatccagcatatgagcgaaggattctatagtttcattaagtttgaagcagaagctgctgctccagctgagattgaaagcagaatccgtatcatggataatgtattaagattcttaatcgttaaagacggagagtaatttattaatcccgatttttaaagatgacgtttgacttgcaactctttatagaagaggagataaagtatgaacaaagttattttaatgggaagactgacaagagaaccagatgtaagatattcacagaatgcagacggttctatggcagttgctagatatacattggctgtagacagaagacgtggaagaaacagtgataatgagcagtctgctgatttcataagctgtgttgcttttggaagatcaggagaattcgctgagaagtatcttcatcagggtactaagattgttgttactggcagaatccagacaggtagttatactaacaaagatggtcagagagtttatacaaccgatgtagttgttgaagaacaggaatttgcagaaagcaaatccgcagcagcaagtaatggaggagactctagttatgctgcgtacacaccatcaagaccagaaccaagccaggcggctggagatggatttatggctattcctgacggagtagatgatgagggtttgcctttcaactaagataggaggtaaaaaccatgccagataagaaggctgagagaccagagggtcagatgagaagaagaccaatgcgtagaagaaagaaagtttgcgcattttgtgcagatgccaacaaggtattagattataaggatgttgctacacttaagcactatgtttctgagagaggaaagattcttccaagaagaattacaggaaactgtgcaaagcatcagagagctcttactgtagctgttaagagagcaagacacgtagctcttcttccatattcagtagattaatatatattaagactacgagccgtagcagggaaacctgctacggctttttttgcgcgggcagcgatgagagaagacatggaaagttcccagtcgtgcttgcacgaactgagaactttccatgtcttttcgaggagcgccgcgacaatgccagaacgaagttctggcatatgagttgcctgcagcagcgagccgtgcaatccagaatatgcctgcacaaagcatacttgtagtatatttgtatacatgatataattattttaattcgattatggagatgtgtgttatgccagataacaaatatgggaaaaaagcatttaaatatagcggactcttgaggtcattttttgcatggccattatatattggggcggttctgattattatatgtgcagttatgttctgtgttaatgtgacagcagcgacagttgtgagcattttcatggttatatatcttatggcatgtggtctcatgtatttctatatgagaccgagaataatgtcgggaatagtggagtttgcatccaattattctcaggttcagaagcagcttttgtataacctcagtgtgccatactgccttcttgataataacggcaatgtcatgtggactaataaggcaatgcaggattgcttaggtattaagagagatttcagaaagaatattaatactgttcttccagaagttacaccaagtatatttccagatagtgaggttggatttaaggagatacgacttacatttcaggacagggattataaggctgaattaaagaatattgacgcagattctatagcagagggtgttgatataatagagaaaagcatggattcttcaatgtatgtaatgtatctttttgatgagacagatattaacacatatatacagaagttaaaggatgaaaggttcgttgtgggacttgtgtatatagataattatgaggaagcccttgatagtactgacgatgtaagaaggtcgcttcttgcaggtcttattgataagcgagttaacaagtatttttctccgggttcagcaattgtaagaaaactggaaaaggataaatatatcgttgtattcagatataatttcttagagaagcttatgcaggacaggtttagtctgcttgaagagattaagagtatcaagattggtaacgagatgacgcttactttaagtatggggataggaacaggttcggcagagtattctaagaattatgatgtggctaaggcagcaatggatcttgctcttggacgaggcggagaccaggcggtagtcaaggatggtgagaagattctttattatggtggcaagagccagcagatggagaagaatacaagagttaaggtgcgtgttaaagctcatgcattgagacagattcttgataataacagtaatgtgcttgttatgggacatacacttgcggatattgatgcatttggttcagctctgggaatatatgttattgccaagaagcttggcaaggaggcgcacattgttcttggagaggttacaagcagtgtacggccttttgtgaacagattcatagacaaggaggagtatccggacgatatgtttataaagcctgatgatgcgccttctaagataaatgcatcaacagttgttattgttgttgatgtcaacagaccacagagaacagagtgtcctgagcttcttgaaaaatgcaagacagttgttgtatttgatcatcacagaaggcagagtgacacaattactggtgcagttctttcatatgttgacccatatgcatcatcagccagtgagatgataacagaaatgatacagtatgttgacgataatattaagcttaaggcatttgaggcagatgcactttatgcaggaattaatattgatactgatggatttaacagtaagtcaggaccaagaacttttgaagcagcagcattcctaagaagacatggtgcagatgtaacaagagtaagaaaaatgcttcgaagtaatatgaatgaatataaggagattgcaaaagctgtaagccgtgtggaagtttataaggacgcatttgcaatatcaatatttaatggtgacgggattgacacaccaactgttggcggtgccaagacagccaatgatttgcttgatatatcaggaattaaagcttcttttgttatcactccttacgaggataagatatatgttagtgcaaggtctattgatgaagttaatgtacagcttgttatggaaaagctgggtggcggcggtcatataagtattgccggtgcacagtttactgattgtacaattgaccaggcaattaataagattaagcttacacttgataatatgattaaggatggtgaaatataatggatgttattttattagaggatgttaagacattaggaaaaaagggacagattgttaagattaatgacggttatgcaagaaattatgtgctgcctaaaaagcttggaattgaggcaacagctaagaatcttaatgatcttaagttagccaggaagagagaagaaaaagaggcagcagaagagcttgcagcagcaaaggagcttgcagctaagattaaagagtgcacagttactgtttctatgaagacaggcgaaggcggaagaacatttggaacagtttcaaccaaggaagttgcagaagaggctaagaaacagttaggtcttgatattgacaagaagaaaatgaagcttgatgtgccgattaaggctttaggtaattatattatccagataaagctccataaagatgtaacagccgaactgactgttaaggttgttgagaaataagttttaagacacatttgtaagaaagggaattactatggacgagtcagtggtaacacgggtgatgcctaacagcattgaggctgaacagtctgttgttggttcaatgattctggacagacaggcaattataactgccgctgaaatcttaaggcaggatgatttctactacaggcagtatggaactatgttccagacaatggtagacatgaataacgagggaaaacctgtagatatagttactctgcaggcaagattgaaggagacagatgtaccggctgaagtctatagtatagagtttgtaagagagctgttatcatcagtgccaacatcagccaatataagacagtatgcgggtattgttaaggaaaaagcagtactcaggaatataataagagttaatgatgatattgccaatcagtgttatgcgggcaaggaaaagactgaagatatacttgctgatactgaaaagaagatatttgagcttgttaagaataagggcggcaaggaatatacacctattgataaggttgttcttgaggcactcgacagaatatctgcggcagcaaagactaaaggtgctgtaacaggtgttcctacagggttcaaggacttagatacttatctgtcaggtctgcagccgtcagattttattcttgttgcagccagaccttcaatgggtaagacagcatttgtccttaatgttgctgaaaatgtggctatcaagcagcagattacaacagttgtattcagcttggagatgtcaaatgtccagcttgtaaaccgtatgttatcactggaatcaacagtagatgcggacaagataagaaaaggacatctggattctaatgactggggtaagcttattgagggtgcagacagtattgcaaagtcaaagcttataattgatgatactccgggtatctcaatcgcagaattacgaagtaaatgtagaaaatacaagatggagaataatcttggacttattattattgattatcttcagcttatgagtggcagcggaagcggacgttctgaaggaagacagcaggaagtatctgacatatccagagcgttaaaggcacttgcgagagagttaaatgtaccagtagtaacactttcgcagttaagccgtgcagtagagcagagaccagaccacagacctatgctttcggatcttcgagagtcaggagctatcgaacaggatgccgacgttgttatgttcctttacagagatgattattacaacaaggatacagagcagaagggtattgcagagattattattgccaagcagcgtaacggtcctattggaactgttaagatggcatggctgccggaacagacaagatttgcagatctttcaagagacttaagacagtaattgaacaagctaaaaaaggaaaaccccgaatcagtattaaactggtccggggttttatgtaagtaccattcaggtacattgaacaccatctggtgaacgttaatctgtatcttgttcagactactgtgggttaggagcgccaactggacatgttccagcacaagcaccacaatcaacacaaacatcagcgttgatttcgtaatgagaagcaccctcgctgattgcttcaacaggacatcctgctgcacaagcaccacaactgatacaatcatcattaattacatatgccatagtatatatcctccttaataatctctttattaactgctttggcagtcgctttagtgatattatacgatagcctttgataaaattcaatatgaatttttatcaataaaatatattattattgttaggtataactaacttgaggtagaataataaagtaaaattagtgtattattgacatttatccggggcaatattatagtaggtatgttgagcggtacaaaagtaccgataatattaacctaataacaggaggtcagtatgacaagaattacgaaggacactacaattggagaagctcttcagatagatgcaggaattatacctattcttatgggaattggtatgcattgtgttggatgcccatcatcagcaggcgagacattagaggaagctgctatggttcatggtattgatccagatatgcttattgaggagattcagaattatcttcagtctattggataataagatggataatagttaaaaataagaggctgtggatttaatgatgaaaaacattaaatccacagcctcttattatatataacttatatataaccggtgattacaatcttcttaatatatgaagtgcatgttcagcaataatgcactcacagtgttcagcaaagaatcctatatgattatcaaaaccggattccttttgcccatattcagaaagaatgttgcagactttattgaaatccttagaagtgcatttgtttttagagatgcacagatagtatcttctgtcagaaggattcttatatactgaattggcatctttgtaaaaggtatctataatgcaagcggcattagttatatcatcaagtgaagaaaatgaaaatacccgtgatatattagcagattccctatgctcaggcttgtccgtagttcctttgtcaggctgtttggaaggagaggtctgggatgctttattgtcagaatctttattgaaatattctttaacacggttaaagatattcataagttcatcttcaggcagaccttcttcatctgtggcagcgcattcgtcaagctcttcattggctgttggcagtgagaaatcggaataatcattaccttctattgtttcaatatcatcaaaatcaaaattatcatcatctgaatcagatggtgagaagcgtgaaaatcttgtatcaagttcttccggattatcaacctttgtgacaatgaggacaatacactcagaagagacaggaattgcttcaatcattaaaggagtatcttccgcctcaaaaccaagttcatatgaagcctgctgcatcatatcacgaaagagttctttcgctttatcactgccataggcaagctcattgatctttaattgtcttgatgccagatcagatttgttaagtgtgcatcttatctggttttcattaagtctttctattttcataagccacctctgactatattacattaatattatttattaaagatataatacccactttttgtggatatgtaaaggtggtggaataacacatggataaaattaatataaaaaatttttaaaaatatattgaaaattaaattattatattgtaatatctgtttaggagatgtttttcatatatcgccgtaagaggaggtgtataacgaattttacgacagatatgaaatcataagggaactatcttgttccagacattctaaagtttatcttgtaaggcaccggatacttgatgtatatcgtgtagccaagatattttcgggtaaccagtatgacgtcgacaggctggttaaggaagcccatctgataaagaatttgaaacatccccacatcccggttatttatgatattgaacagaatattggagaagataatagtagtatctgcattattgaagaatatattgatggtaaatctttgcggcaatatgttaatgatgaaacaggtgctggcggcaatctgagtgttcatgaaatatgccgtattggcgttgaattatgttgtatactggaatatcttcatggttttaatggcaatggaatattacacatggatattaagccagataatattatgcttgatattaacggaaaagttaaactaatagattttgacaatgcggttgcaggtaatgccggagtgtcagttgatagcggaagtccgttgtatgctgcaccggaacagtatagtggagagtatgctgtgacgcagtcagatgtatatagtgtgggaatggtaattctttttatggtctcacatggtcatattaagaccgataagggccataatttagcagggataccgaggcggtattcaagattgtatcatgttattgaaaaatcaattcatcatcaatggggactgcgatacagcagtgttacattattaaagaatgagttgcaggggataatgagaagaagtggcggtacaattgaaaaacactcctatatagtacaggttgcaggggataaggcaggtataggaactacgcatacggtaatgtgtatggcacatttttttaagaaaaatggaattagttgtgttgtcgttgacaggtctggaaacaggcgtgtacttccgccgtttttaaaaaacggacttatggaagatggatcttatatatataagggcataaggataattccagattataatggagcaatatcggtgagtgcacagaaaacggatattattcttgttgattcaggacatagtatgcgggagctggaaaatgataaggatattatggatattgctgttgagaattatgcatatatagaagtttgtgtgactggaaagcatatatgcgaagagaataaaaggttaagaaaactaaaagaagacagggtttatatgctgaatcttgtaagtgccacacagttttatgaattaacagatatgctgaaaggtaaaaaatgttatcgtgagccatgcatatatgactggtgcgaggataatcctatatttgacgaaacaatgaatgatttcttacaggataaccttcctgaattatgggaagattgcagacctgatagattaaaggagtgtattggcaggttatatgagaagattagtagtatcagatattttaaaggggttaagaaaaagaaaagcagataatgatgaagcggctatgaattataagactgtcggactgattggtttatgcagcggtgccggaacaacgcagcttggtatcatgcttgctaattatttttctaacggactgcatctgaaaacagctatagtaagtgctggatttgatgattcatttgacagaatcaaagaggaagaacaggttggtaaagtcaggaattatgctggcagcagacgggggttttcatataaggggatagacttctttggaggtgtaagagaaggtttcgtccatgttatatcagagtattatgacgtggttatagtagagattaatcttgctggcctgaaagaaaaacttgcagatggcttaagagatgttatgtcttgcgaatgccgtattcttgttggatcaatggttccatggaaatatggagaatgtataaagagactggggcggataagaagaatctacagtgttaaaaacatgcctatagtttcagttacgtggcaggaaaaacgagcaaggagcatggaacgtgaattcgaactcagagcatataaagcacctatggaggaaaacccttttgagatgaggggaagtgccataaaggctttgaagcaggttgtaacttaaaatttcatttatgtctgatttaaaggtctaaaagaaaatatatcgcaaatcatgccctatctgattccttttgcgtagtgtatgattaagttcagggcatatctttattatggaaaatctgtgataaaggtatgcctttacttgcaacggtattgtatcaggtggtacaatattataattgtagtgaataagaaaggcagacagatgaaaataaaagttaataaaaggattaagggaattactattgcagcggcggcattggtactgattattgtcgtggcagtaatgtttattatagtgagatatacacctgccaaagagaagatgagtggttatacatattatggcatagacaggaatacggataaggtttttgttataatagatggagaactgtatccagatactggaattatatatgaaggccggtattatcttccacaggaatttatagcagataatattaacgtcggattttattatgatacagaaagtgacgcagtattatattcggattcggaatatatgtatacatataagaaaggcgaaaatgtatatacggacgatacaggtaagacatacaatacagattattctgttgtagtggaatcagagggaaaatgttatgtcaactgggaatatgttgcagagcatacagattgtgaatatgaatatggcaatgagccggaaaggattaacataactctcgaaagagaagaaaagcagtatgtaactgcacagaaaaagactgctgtaagatacagaggtggaatcaaaagtcctgttcttgagtatgtgcagaagggggacagattagtgtacgaggatgatcttgacgactggataaaggtgacaacagcgacaggttatacaggatatataaagaaatcagaggcatcagatacatttgcgtacataagagaagaaaagaattatgagactcataattataatatgaaagatgataagattacgcttgcctggtttcaggtaagcggagtggctggcaattcaggaatagacaataatattgctacagcgtcaggtgttaatgtgcttgcaccaacatggtattcggttacagattcatcaggcaatatgtcatgttatgcatcggccgggctggtcaataaaatgcatcagagaggaacagatgtatgggcgcttgtaagtgattttgatacgaatgtggattttgctgcgctttattcaagtaagaaggcaagaaccaacatggttaatacacttattaatgatgcagaaaaatatggatttgacggaattaatcttgattgtgagaatattaagagtgcatatgccaaagattatctgcagtttgtaagagaattgtcgattgcatgtgaaagaaaaggccttgtgttgtcaacagataactataagccagaggcatataacagatgctataatttaaaagaacagtcaagattcgttgattatgttattgtaatggcatatgatgaacactatgcaggaacagatgccggttctgtagcttcacttccatttgtaaaggaggcagttgaggatacagtacagcttgttggtaaggaacatgtaatagcaggtattccattttatacgagaatatggacaacaacagatggaaacacaacaagcagggctgttggtatgcaggcagcagttgaccagttaaacagtgacggacaggttgcattgtggaatgatgactgtggacagtatgttgcttcatatactgtgggaaatgccacaagacagatatggtttgaagaagagaaatcaatagaggccaagatgcaggttatacaggaaaataatgtggcaggtgttgcaggctggaaattaggtcttgagaagtcatcagtatggccagttatcagcaaatataataaataaaagtaatatgcataaaccttctgtaataaattagtaaagaattacaggtttcggagttgttatgccagaaaaagctgatataagcaggacacttcttctgccgtttatgtcaataatactacttgttgctgtctacatgacagccaatgtacttctgccattaaaggccagtggcaaaggcagcaaagaaagtgaagatgtgcaggagagacaacatttgtcagatgatgcaggtgatggtgaagtcgttgagatgaatattaatttttctgaaaaatgtatcgttattgatagtgggcatggtggcgcagacccaggtaaagtgggggttgcgggaacaaatgaaaaagagattaatcttgcaattgcaaaaaaattacaggaacggcttgaagatgcccagattaatgttattatgacaagagacacagataatgatttaagcgtggagtccgataagagtaaaaagaaagctgacctggaaagaagatgtgatataatcaatagcagtggtgcagatatggtaattagtatccatcagaacagttatgtcacacctaaggcagaaggtgcacaggtattttattataagaagtctgaggaaagtaaaagaatagcacagataatgcaagggattcttggtgagaagttaggtacaacaaggcagattaagtcagatgttaattattacatactgcttcattccaagcttccaacaattatatcagagtgtggtttcttgtctaatccagaagaggagcagagactgtgtacggaagaatatcaggaaaaagtggctgatgctctgtattgtggtataatagaatatctgatgatgaatatgaagtaatgaaagctggcgaaaggttttatggaaacaataataaagaagataacacacacagaagaagataagaaaatatatgaacaggcaggacagattctaagagcgggagggcttgtggcttttcctacagagactgtatacggacttggtgcggatgcacttgatgcgaaagcttcagccaagatatatgctgctaagggaagaccttctgataatcctcttatagtgcatattgcagatgttaatgcattatacgatttagccaaagaggtaccagataaggcacttgtgctggcagaaaaattctggccgggtccgcttacaatgattcttaagaaaaaggataaagtacctgattccataacaggggggcttggaacggttgcgataagaatgccaagccaccctgttgcagcagagcttataagaagctcaggagtatatatagctgcaccaagtgccaatacatcaggaaagccaagcccaacaagggcagagcatgtaattaatgatttatctggaagaatagatatgattattcaggatgatactgtagatataggtgtggagtctacgattattgatcttagtgaggaagtaccgactatattaagacctggctatattacacaggctatgtttgaggaagctattgggaaaacaataattgatccggcaattatgggaagccttaaagaaggcgtgatacctaaggcaccgggaatgaaatacaagcattatgcacctaatgctgatgtgaccattgttgaaggtccacatgaaaaggttgtacagtatattaacaggcaggtgtcagaaaaagaagcagaaggtcacagatgtgcagttatggcaactgatgagacaaaagataaatatatatgcaatgatattgtttcagcaggacataaggatgatgagctgagtgttgcaagaaacctgtatgcgatattaagggactttgacaagcagaaagtagagtatgtttactcagaaagttttgagacaaagaatgtgggacaggctgttatgaacagacttatcaaggcagccgggcataaaatagttaaactggattaatacatttttaaataatgaagatatgaggatttcctatgaacacatttgacaaggtgatattcgtatgtaatggaaatacatgcagaagtccgatggcggcaactgttatggctaatcttaaacaggatattatatcggaatccagagggatggtggtgcttttcccagaaccatataatccgaaggcggttgctgttgcagccaagcataatatgataattccgaacaattcagcaaaacagttgttgaatgaggatttcggaaatgatacacttgtactggctatgaattcgcatatgaaacagaagatatatgatgaatacagtgaggcaattaatgtatatactctcagtgaatatgcaggagagcctgaacaggacattaaagacccatatggaaaaggcattgaggaatataatgcatgttttgaaatgatatgcaggctggttggcaaggttgcagagtatctggatgggttgtcagaagaaaaagaagataaaggagaagaacaatgatagcaattggttgtgatcatggagcattagaactaaaggagcagcttatagaacatcttaagaagagaggtgttgagtgtaaggattatggcacatatactaaggattcatgcgactatcctgtatatgccaagaaggtagctgaggctattctttcgggcgagtgtgaggaaggaattcttctttgcggaacagggattggaatgagcatggccgctaataagattaagggaataagagcagcgttatgcagcgactgcttctcagcacaggctactaaggaacataacaatgccaatgtattgtgtatgggtgcaagagttatcggaccagagcttgcttttagaatagcggatacatttttagattccaaattttctaatgatgagagacatataagaagaatcagcatgttagaggattaataaatgggtgataagagaaaagattatatatcatgggatgaatatttcatgggaattgcaacactttccggtatgaggtccaaagaccccaatacacaggttggtgcgtgtatagtaagccaggataataagatattgtccatgggatataacggattgccaagaggctgttcagatgatgagtttccatggaacagagatggtgaagataataagtatttctatacaactcatagtgagcttaatgcgattcttaattacagaggcggaagccttgataatgccaagctttatgtaacactttttccatgcaatgagtgtgcgaaggcaattattcaggcaggaattaagactgttgtatatgattgtgacaaatatgcagatactgcatctgtaattgcatcaaagagaatgcttaatgccgcaggtgtcagatattacaagtatgaaagaacaggtcgcacaataacaattgacatgtaaaaaagggtctggaaacgaataaggtttccagaccctttagaacttgttattcatgtgattcaagaattctgatgtattcattaaaggtaccgttatagatggcggtaagaagcttgttaagcttgtgaagcgcatcagacataagctcacagcttataatattctctgtaagtgcatcgcctaattcatcaaggtcgacaacacggacgcgcccgtcattctcaattatgacatcagcgagaaggtcagtgaatatatatgtatcagagacagcatcataagaagtgtcaataatgtcacaatagatatatgcaagagagttatctgctttatagaatttgcttatcttaaacccttcgttaataacataatatgatgttccatgtgtgaattcagcttttggacggaatgtgttccaactggtcacaatagtatcagaatctaagaatattatgttatcgtccttaagattaacgcattcatcaggaataagtctttttctgtataatgtaggcatataaaatcccccttttcgggtatagttaataatacacaaaatataatgacaaaattatatcagcagattaattaaatttcaataaaaagggttgaaaaatatacctataaattggtaaaattaatgcagacttttgtgaggaacatgatatgaagaatgatagcaaagcattacgaaatattgtactgatatcccagctcgctatatgtgtgatggtgccaacatttttatgtctggcacttggaatatggcttgataaaaggtttggaacatggtttacggttccactgctttttattgggatggcagcaggtgcaagaaatgcatatgttctggcaatggacacaatacgacaggagaagcttaagaaagataaggcacagcaggatgaaatcgacagaaaggtagaggaatacagaaagaggcaggaaaaagattccagtgaaattaagaggtgatttatgttaaaaagaattaaagatattaatgaagctcttccgggaatgctgcttatagaatgtatttatcttgttgttgctcagataattatatttattgctgttccgaataagataatgtgtgcagtgggactgcttgcgggatgtttatatgctgtattcagttcatttcatttaagctttactatacgaaaggttgtgtatggtgggcataagcagtcttcaacacttgtatttgggtacattgtaagatttcttgtaatgataatactgcttgcattattgtatatctttaaggcaggagatctgctgtgtgcaattattggcatgttctcagagaagatagcggcatatctgtcgcctttattggacaagaaaaggtccgcaaaaggggaaaacagtactggggagtttcctcagactgataaaaatataatagaaaaggagagtgagtaggtgggaagcgagagtttgactacgatggtggccggagattcaagtttcatgattaagacgctgtacacatttaagctgaatggcgtttcattgaacattgacacaacacatgtggctctgctgctggtatcagtctttattcttgttatggctgtaatagcaaggattaagattaataaagtcgatgcttcagatacaccgggaatgttccagaatgtcatagaaatcatcgttgagatgttaggcactatggttgatggtattatgggtaagaatgccaacaagtttgtgaactatatatccacattattcttgtttataataatatctaacatatccggtctgtttgggttaagaccaccaacggctgattatggtgttactctgtgtcttggtctgataacatttatactggttcagtttaatggtatcaagaagaacaggattaagcactttacagcattattccaaccgatatggtttttattcccgattaaccttattggtgaatttgcagttccgttatcattatcattacgtcttttcggtaatgtaatgtcaggaacagttcttatgggattgatatatgatttgctcagtccattcacagttgcatacccggcagttctgcatgcgtactttgatttattctcaggctgcattcaggcgtatgtattctgcatgttaactatggtttatgttaacgacaagatagccgattaacggcaaatatttttattagacggaggatttttaaatgaatatttcaggaagtgaatttattagtgctatgtcagcaattggagcaggtattgcgatgatcgcaggtgttggtcctggtgttggtcagggtatcgcagcaggttatggtgcgtctgcagtaggacgtaatccgggagctaagtctgatattacttcaacaatgcttcttggacaggccgtagccgagacaacaggtctttacggttttgccgtagctattatcttaatgttcgttaagcctttcggaaactaagaagaggtgcgaagataatagaaaggaggcctacaattgaatttgtcaggaaatacatttgttgccatagcggctgatggacgattattcggtctggatccgcagctcctttttgatgcagcagtaactgcagtcaatgtatttgtactgtttcttttacttacatttattcttttcaatcctgtaaggaatatgttaaagaagagacaggacaagataacaagtgacagggagaacgctgagaacgataagaaggaagcgggtgcccttaaagcagaatatgaggctaagttaaaggatgcccacaaggaggcagaacagattcttagtgatgcaagaaagactgctatgcataatgagaccaaaatcattgatgaagccaaggctgaggcagcaagaattatagaaagagctaatgttgaagctgaacttgagaagcagaaggttgctgatgaggttaaacagcagattgtaactgtagcagctgttatggcatctaagttagttgccagatctattgatgagaaggacagcaatgctcttattgaagagactttgaatgaaatgggtgagaaaacatggctaagctaattgaagcaacatacggtgatgctttatttgagcttgccgtagaagagtccagagtggattctctgtatgatgaggccggggctgtcattgaagcatttaatgataatcctgagtttggcagactgctcaatcatccagaagttgaaaagggagaaaaggaagaacttattaataacattttctctcagtttgtttcaggagatatgacaggtttgctgataaccatggtctcgaaggacagacagaaaaagattgttgatacacttgagtattttcgaaagagagttctcgaatacaagaaaataggaattgcttatgtaagcacagcaaagccactcactgatgaacagaagaaggctgttgctggaaagctgttagaaactacaggatatgtagatttccagatgaattatacggttgatgaaagccttattggcggaatggtaataagaatcggtgaccgtgtagtagacagcagtattaagcataaaatagacgaactttccagaagtctgatgaaggtccagttataggaatatcagacaggttagtttaattaatcagaaagcgggtgcatagagctaatgaatttaagaccggaagaaatcagttcagttataaaagaacagataaagagatattctaccgaacttgaagtatcagatgttggtactgttattcaggtagcagatggtatcgcacgaattcatggattagaaaaggccatgcagggagaacttcttgagttcccaggcgaggtatatggaatggtacttaaccttgaagaggataatgttggtgccgttttacttggtgattcaagaaatgttaatgaaggcgatactgttaagacaactggacgagttgttgaggttccagttggtgacgcattgacaggacgagttgtcaatgcattaggacagcctattgatggcaaaggaccaatcgttacagataagtatcgtaagattgagagagttgcatcaggcgttattacaagaaagtcagtaagcgttccacttcagacaggtattaaagccattgatgccatggttcctatcggaagaggacaaagagagcttattatcggtgaccgtcagacaggtaagacggctattgctattgatactattattaaccagaagggtcagggcgtacattgtatatatgttgctatcggacagaaggcttcaactgttgcaagtattgttaagactcttgaggaatatggtgcaatggcatatacaacagtagtggcatctacagccagtgaacttgctccattacagtatattgctccttattcaggatgtgctattggtgaagagtggatggagaacggtggagatgtattagttgtttatgatgatttaagcaagcatgctgcagcgtacagaacactttctcttcttcttaagagagcacctggacgagaggcttatcctggtgatgtattctatcttcattcaagacttcttgagagagcagcaagaatgtcagatgaatatggtggaggttcacttacagcacttccaatcatcgaaactcaggcaggagatgtttcagcatatattcctactaatgttatatctatcacagatggacagatatatcttgagacagagatgtttaattcaggtttcagacctgctattaatgccggattgtctgtatcacgagttggtggttcagcacagattaaggctattaagaagattgctgctcctatccgtacagagcttgcccagtacagagagcttgcatcattctcacagtttggttcagagcttgatgctgatactaaggaaaagcttgcacagggcgaaagaatcagagagatgcttaagcagccacagtacaagccaatgccggttgagtatcaggttataatcatatatgcagttaccaagaagtatgttatcgatatagatgttgacagaattcttgatttcgagcagggattatttgactttattgatactaagtatccacagattccagagtctattaaagagactaaggaactgacagcagataatgagaaggcacttatagctgccatcgaggagtttaagaaaacatttatccagtaaatgttttggaatggaggtaatagtttatggcctcaatgagagacataaaaagacgcagagatagtattcaaagtaccggtcagattaccaaagccatgaagctcgtatctactgttaaattgcagaaagctaaaggaaaagcggaaagtaccaggccgtatttcgaccttatgtatgataccgtaaagaatatgcttgccaagtcaggtaatatcaatcacaaatatctgaaagccggagattcaagtaagaaagcgattatcacaattacagcgaacagaggacttgcaggaggatataattctaatattaccagacttataacaggcagtgatattcctaaggaagacgcacttatatatgcaataggaacaaagggaagagatttcctttcaagaagaggctatcagattaaagcagattattcagatacggttgaagaacctgcgtatacagatgccaaagctatatgtaatgaggtgcttgatgcatttacaagtggagaagtcggagagatatatcttgcttatacatcttttaagaacactgtggttcatgaacctaagcttatcaagctgcttcctgttgatgcagattcaatgaaacaggatggagcagagactgataatacacctatgaattatgagccgggtgaagaggaggctcttaacctgattatacctaagtatgtgtgcagtcttatatatggagctatggtagaagctgttgccagtgagaacggagcacgtatgcaggcaatggacagtgctacaagcaatgcagaggatatgatatcagatctgtcgcttaagtttaacagagcacgtcaggcttcaattacacaggaacttacagagattatagcaggagcgaatgctatcaattaataaaacaatggagggaataatggcagagaataatattggtaagattactcaggttatcggtgctgtaattgatattaagttcacagacggtaatctgccagaaatcaattcggccatcaatattaagactaatgacggcggtaagcttgttgtagaggttgcccagcatcttggcgatgatgtagtaagatgtatagccatgggtcctacagatggtcttgtcagaggtatggatgcagaggcgacaggtgccccaatttctgtaccggtaggtgaacagactttaggaagaatgttcaatgtattaggtgatccaatagataataagccagcaccagaagtacaggagcatatgcctattcatagaaaggcacctgcatttgcagagcaggcaactaatacagagattcttgagactggtatcaaggttgtagatttactttgtccttaccagaagggtggtaagataggacttttcggaggtgccggagtaggtaagacagtacttattcaggaacttatcagaaatattgcaactgagcatggtggatattcagtatttactggtgttggagaaagaacaagagagggtaacgacctttatcatgagatgatggaatcaggcgttatcgagaaaactaccatggtgttcggacagatgaacgaaccacctggagcaagaatgagagttggtcttgcaggacttacaatggctgagtacttcagagataagggtggaaaggatgtacttcttttcattgataatatctacagatttacccaggctggttcagaggtttcagcacttcttggacgtatgccttcagccgttggttatcagccaacattacagacagagatgggtgctcttcaggagagaatcacatctaccaagaacggatctattacatctgttcaggctgtatatgtaccagccgatgaccttactgacccggctccggctacaacatttgcacatctggatgctactacagttctttcaagatcaattgttgagcttggtatctatccagccgttgacccgttagagtctacatcaagaattcttgatccaagaattgttggtgaggagcattacaaggttgcaagatcagttcaggaaatcttacagaaatacaaagaattacaggatatcattgctatccttggtatggacgagctttcagaggatgataagcttgttgtttcaagagcaagaaaggttcagagattcttatcacagccattcttcgttgcaggacagtttactggtcttgaaggaagatatgttcctgtaagtgagactattcagggcttcaaggaaattatcgaaggaaagtatgatgacattccagagagttacttccttaactgtggtggaattgatgatgttttagctaaggtagagaagtagaaaagaggttgtaatggcagatttacagacaataaagcttctggttaatacgccggacagagttttctaccatgatgacgctacatttgttgaactttctaccagtgaaggcgatataggtgtttatccgggacatattccgcttactgcagtagttgttccttgtgttcttagtatacacaatggtaatgatgtaaagaaagctgcggtacacggtggaattatagagattctcaaggataagataactattcttgctgaggtggcagaatggtcagatgaaatcgatgtagaaagagctaacgaggcgagactgcgagctgaaaagagacttgccagccatgattctaatctggatatggtaagagcagagacagcgcttaagagatcacttgcgagaattaaggctgttaattaaataatatgtataaaccttccattatctgggaatatttcaggtgatgggaggttttttatatggtaaagatatatagggttcagaggctgatgatagcagccgcagtaattatatgggtagtatttgccggcagacttgtatacaagggcataaagggtgagacaatggatgttgtagatacattttgtgaaaatgtgtactatgatataagcgccgacatatcagcgacagtaaagcttgataatggaatgtcagatactgcaaagaaacttatgatgacacagatggcaaaggctctgggacttaacagatataatataatggaggatgaaacaggaatatatcttacacagcaatcagttaatggcagcgcagatatatcaataaaaaagagcagtacaggagaatattttataactgatatagaactatataagggatttgagagtacttcagattatgaaaagctgatgaaacaggtgttagaggaatatggaatagatactcatgtaacagtcagcatgaaaggaagcatagccggggatatgtcacagtatgataagagcgaggtcagcggtaagatgcttaagatgctgggtgcaaagactgtgactacgggacagatacaggattcatatgttgtgtacgcttatgctaaaagcgttaaggattctgtaagcatagggaagaataagataaatgttaatataacaatgaattatgacgagacaaggggagtgacggatatacagctttcaacaccgatatataatgaggatttctgatgatgattttttaaggcatgaaacttgctattgtggttttcgtctaaagagattaaaataaccatgtatatccagaggataaatcaagaaaagatgaggcagatatggaattaaaagagcttttagataaatgtattaatgacaggcttattgatcttacaataagcggacagaaggtaaagaatgaagaagctgcgatgagggttaagatacgtcctgtccagctgaaagatgagataaaatatcaggcatcagaattcgtaggaagaaaagtgcttcacaccaattattcagaagaagacattaagacaagaattacagaatatatggagaacacatttaaacaggcgcagtttaatatgacagatgcgactgccacggtgcttagttcaaagaagggcgcatgtacctgtaagtataaaaggcttgcacagataaagagtcagaaggatatgtcacacaacagaaccaagacatatattcttaaagagggcgagaaggtggattttcttgttgatcttggagttatgactaaagagggggcaattgtaagaacaagatatgataagttcaggcagattaatagattccttgaatttatagaggatattctgccacagttagataaggataaagaacagacaataattgattttggatgtggaaaatcatatcttacatttgcaatgtattattatctcaaggtacttaaggggtataatatcaggataatcggacttgacttaaagaaggatgtaatagagcactgcaatcagttaagaaccagatacggctatgacaagctggatttctatgagggagatattgcttcttacaagggggttgagtctgtagacatggttgtaacacttcatgcatgtgatacggctacagattatgcactcgccaaagcagtaaaatggggtgcgaaggttatactttctgtgccttgctgtcagcatgaggcaaacagaacaattgcagatgaaactctatcacctgtcatggattatggaatcttaaaggaaagatttgcagcaatagcgacagatggtgcaagggcaaagcttttagaatctaagggttaccagacacagatactcgaattcatagacatggagcatacaccaaagaatctgcttataagagctgttaagacaggaaagcctgatgctaaggcttatgaggaagtacagaatatgagcaggatgcttaatattgaccttacgctaaagaagcttttggaggattaaattgaaaagaatcaggaattatagtatatcaggttctaagtattttatacttggagttatatttttagttacggttatcataacatttatatcaatgaaattcgaacagataatgccgtcagcaaccactatggcagatgcaacccttccaacagttgcaatggatacagaggcaggaacacagtataatgtgcttcatggttacacttcggagctggattccacattattctatggcaacattacacctgttgcaaaggacagaaagctgacagttacaattaatacatacggagaagatattgaaggtgtggcatacaaaatccgttctttagaggataagtcgcttattgagaatactgaggttagtgattatgataatgcaggcagcagtataaatgttacatttaacataaagaatcttcttgataccggaaaagagtatgcgcttgaggttgtgcttaagacaaagaagcatgaggcagtatattattacacaagaattgtttatggagtggattatgaccttcagaaaaagcttgattttgtcatggatttcaatgcatgtacatttgatgacagtagacttaaggacatagccggatatcttgaaacttcaagttcaggcgataacactaattatggaaaggtaaatattaactgctcattaagccaggtcggctggggagaccttgacccatatgtagagagtgatattatgccggaggttatatcagttgatgatgatgtggcaatattaagacttagttacagagttggagcagcaaatgattattcatcaagtgatacatatacagtaagtgagtattatagaatacggcagactaacagtggtttctatcttcttaatttcgagagggagatgaatcaggtatttgacgcaaggaacgacctgacttcaacggcaaagattaatcttggaattaattcttcaacagatgttaattgtgcatctgatgaaaagggaatatatacctattttgttaatcagggttcactgtggtgttttaacagcagttcacagacatttacaaaagtattctcgttcaagggtgaggagactgattctgtaagagaaggttatgatgcccataacattaagataatgaaaatagaagataacggagatgcaacatttttagtatcaggatatatgaacagaggagagcatgaaggacaggttggcgtatctttatgcagatattcgtattcagataatgatgttactgaaagactgttcattccagtggcgattccttataacattctcacacagaatgttggtggcgtttcttatgtttctaacgacaaattctatatacttatagatgagactctgtattctgtagaccttgtaagtaaagaggtcatgacagagataacaggacttaaagagaattcatatgctgtatcagatgccggagatgccatagcatatagtgtgtcaggtgatatatgcaacactgatacgataagagttcttaatatgagcaacgacagcgcttatgagttaaaggcagatgaggcagatacattaagaccacttggttatatcgattcggactttatatatggaatggctcataaggaagatattgtatcagatgcagatggcagcagaacatatgcaatgtacaaagtcggtattatggatgttgattataatattattaaacaatatgaacagcctgatatatatgtatctgatacagaggttgaaggcaagagaattacgcttacaagaatagtgaagtcaggaagcggttatgtgtcaacgagcatagaccagcttatcaataaggatgagaatgttgttgaaaatgttgtaaaggctgatacaataagcacagacgcaagaaaacaggaattatatattgaccttataaccaaggtaaatgatatatctgttagttacagaacttcaggcgagattatatttaaagacaatacaagtctggaacttgaagatgaattcacatgggatggaagatattatgtatatggatacggaacattccagggaagcaggacacagcttgaatcagcaataacgcttgcatatgacacatatggaacagtggttgacagcgattctaaacctgtatggaaaagatacagaagtgcgcagacatccatagatggtgtttcaccggttattggtggaagctctcttgaaaatgcagttacaacagtatgtaattatcttggggctgattataatgccgcggcttacatggaacagggatatacagcagtgcagacaatgaacatgataagcggagtacatggaataagtcttacaggaataacatatgagaaggcattaagctatgtcggagaaggaagtcttgtgatagcaaagaccggagaagacgaatatataatcattactgcatataattcaagtgaaatagcatatattgaatcatcatccggttcagtaaagactatgtctatgaatgatgctgggaaaatgttttctcagggcggcaatatatatgtaacctattataagtgatgatatgcacagggattgaatattatggcgaagaagaaattatcaaaaaagaaaagaagacgcagattaataagaaggctgatacttcttacattactgctggcatttgttacaacacttgcaatattttcaccaaagatagtaaagataataaagcttgcgcaggaggctaaggagcttgtaaataaaagttccttagacacatttatggcatcaggaacaacagttatatatgatactgatggcaacgagctgtgtaccatgcgtgagtcaaaggatatgtattatgttgatataggtcagataccggatacattacagaaatcttttgttgttatggaagataaagacttttataaacataaaggaattgatttcaaggctataataagggctgtgatagctaatacagagaatgatgaaattgttcagggtgcaagtacaataacgcagcagcttgcaaagaatatattcttaagtcaggaagttacctggcagagaaaggtaaaagaaatatttgtggcatgggatctggaaaagaaatatacaaaggatcagattcttgaattctacttaaacaacatatatttcagtaatggatattatggagtaggtgcagcagcgagagggtattttgacaaagatgtaagtgagctgacagttgctgaacaggtatttatagcggcaatccctaacaatccgacaagatacaatccactgactaattatgataacacagttgggagaagagacctcatacttggaaagctgtatgaaaatgatatgattaattccatgaactattacactgcgcttgatacgcaggtggttctggcacagcagcccgaggtttcaaagaacaattctgtcgagacatatgcaaggcattgtgcgacagagagcatgatgcaggcgaatggctttgtgtttagaacgaattttaacaatgatgatgattacgaacaatataaagaaatatatgaaaacagctatacactgtttcagcagaaactgctttccggaggatacaaggtatacacaagtatcaacatggatgtacagcagatgcttcaggatgctgttgatgataatcttaaaggatataccgcagaaaaagacggagtgtatgaaatgcaggcagcagctacctgtattgacaattcaacaggaaatgtagtggctattgtcggttcaagaactcaggatttagatggatatactcttaacagggcatatcagagctacagacagcccggaagctccatcaagcctgtgatagattatgttccgtatcttgaaaagggtaatacacctgacaccatagttcaggatgaatacattcaggatggtccgaagaatgcagatggaacatatatgggaagcattacattaagaacagcggtaagtctttcacgtaacacagttgcatggaatgtacttaaagaacttacacctaaggttggcagttcatatcttctcaatcagggatttcataaagtatggatggataaagaatacaatgcgattgccataggcggcttcacatatggtgtgtcaacagaggagatggcaggtgcgtatgcaacaatagctaatgatggcgagtacagaagagttacatgtgtatcccagataaaggatacaagaggaagaatagtatatgattcatctggcagggggcagaagatatatgatgctgaatcgtgcaggatgatgacagatatgcttgaaactgctgtgaatgaaggaacaggacgcggggcagcaccagataatgcaattgttgccggaaagactggaacaacgaactctaattatgattcatggttctgtggatacagtgcttattatacagtggctgtatggcagggatatgattatcctgcatcaatcccacagagtcatacaaaggatatattcaggcaatttatgcaggattcacataagactctggcaaagaaggatttccctaagtacagacagaagtcagacaataaggagacagaaactgaatctgtaagtgaaacacagacagaaacgcagtcagtcagtgagacgcagtcagtaacacagacgcagaagggcagtcagatccagtcgccaagtcagatggaaacaggcacggcaagggataatgatgcaactgcaggcaccagacaggatagtacggcaggaggaagtgaaagccgggcagatacagataagccggcagagactaaaggggatatctcaggttattaattgcagatatatcgtagatgtaaataaaataatacttgcagaaaagtggattgtatgataaattttagtggggtaaacttatagaaatatgagggcacaaaactagaagtctaaggctaatgctatgatggttcggttgcatttaggaaatgtttcttaaatgcagccttttttgttttagcagagacttgaaaataattgttgatagtgtcaaatggcacacgaaattaatgcatagcagggaaaacctactaaagttgctaaatatgatgaaatggtaggtttactaaggggattgcttatgaaaaagatattgataataacattaatggttatatgtatgattttcaatataacagcatgtggagtaaaaagtaataataccagtaagtcgccattaagacaaacaaaggatatggcagaaaatgtctatgatgccataaagaatcatgacagtgaacagctaaaagaacagttctgcgaaaggctgcagccggggaaagagacagtggtagacaaaatatatgaatatatagacggagaaatagaaacgcttgagacagattttgaaacagataattatgctgacacaggaggtggagaaaatagaggagataaattgtcaaagggatttagtttcggtatatatgttgtttctgataaaggcacaagatatgaaattgtaggaaaaggagatgtaattaatactattgaacctaagaatcagggactgcaaacaataattatatatcgacagaatgaagatggaacatggaattacaaaaacaatgtctttagagtaggaagtgaattagattaagcgttgtaatggaatgtcggatgtatattggagaccagttatgaaaaaagtaataacactatttttaatttgtatattgataatatttaataccatatcatgtggatttgatttgagcaataaaagtgaaacaatattagaaaaaactgaaaagatggcagaaaatgtctacgatgctataaagaatcatgacagtgagaagcttaaagaacagttctgtgaaagattacaaccgggtaaagagacggcagtagacaagatatatcaatatattgatggagaaatagaaacactggaaacagattttgaaacagaacactttgcaagagcaggtggtggtggaaagacaaggggagataaattatcaaaaacatttgtgtttgaaataatcattaccacagataaaggaaccagatatgaaataggaggtaaaggtgatatcatcaatacaatagagccgaaagaccaaggattacaggtgcttcgtgtgtataagcagaatgaagatggaacatgggattatacagatgattatctacagataggaagtgaacttgattaaatatcataatgaatagcttaaataagccgtttaattatgaatgaaacatttataaaattatgagaaaaatattaataatgtcattaatggttatatttataattttctatgtaacagcatgtggagtaaaaagtaataataccagtaagtcgccattaagacaaacaaaggatatggcagaaaatgtctatgatgccataaagaatcatgacagtgaacagctaaaagaacagttctgcgaaaggctgcagccggggaaagagacagcggtagacaagatatatgaatatattgatggagaaatagaaacattggaaacagattttgaaacagataattatgctgatgctgggggcgggggagaaattagaggagataaattatcgaaaacatttgtttttaggctggtaattattacggataaaggagttagatataagattggggcaaaaggcgatatcatcaatacaatagaaccgagagaccaaggactacaggtgcttcgtgtatataagcagaatgaagatggaacatggaattattcaaaaggttacttgcagataggaagtgaattagattaagaattaagataaaaaaccggaacccgacaattagtcaagttccggtttttagtataaatattacttgaattacttaccgtaatgaagttcgttatattccttaactctctgctggattctttcaacagggcttaagaggttgctgatagaagaatcatggttaagtgtatcaataagaagagccatgtatttgctcatatcaacattgatgtaccaaggcttagagagaagctctgttggctggtacacaaggttagttgtaaggattctgtcgataataccattctcatatgcttcatcaaacttcttgaagccgttagtgaaaagaccgaatgttgttgcacagaatactctgcttgcaccacgcttcttaagctcagaagcaacatcaatcatactttcaccagaagaaatcatatcatcaatgataatgacatccttgccttcaacattagttccaaggaactcatgtgcaacgataggattacgtccattaacaatcttagtgtaatctcttctcttatagaacatacccatatcaagaccaagaacattagcaaagtaaacagcacgtcccataccaccttcatccgggctgataaccatcatatgctcgctgtcgatgtgaaggtcgtccacattaagaaggagatacttgataaactggtatgtgcatgatacagattcaaatcccttaagaggaatagcattgtgtactctagggtcatgtgcatcgaaagtaataatattctcaacgcccatatctgtaagttcctgaagcataagtgcacagtcaagagattctcttcctgttctcttgtgctgtcttgattcataaaggaaaggcatgattacattaattcttcttgcctttccacctgcagcagcaataactctcttgaggtcagcatagtgatcatcaggagacatatggttcttgaaaccgcaaacagtatattcaaggctgtagttgcagacatcaagcataatatataagtcatgaccacggacagaatctacaagaacgccctttccttctcctgaaccgaatctaggagtcttagcgttaacaatataactgtctctcttatatcctgcaaaattaagggtagaagtattctcattctgacgctgctctctccactttacaaggtactcgtcaactttcttacccatttcagtgcagcttgctaatgggataatacctaaagttccgtagggaatagtttctgtgtgtctttcatcacgtggcataataaataatcctccataaaagtataataattaaacatacatataaaaatataaacattgacgcgaaataagtcaatgatatatttgacataaataatcgttaagaccttttagttggtgataatttcttcatacagcggatatcatctccaaagagtcttaaaattgaataggcacttacaagtcttgaaaaaattctctgtgagtaccttgtctcaatatcaggcatctcaaggttagaagatataataatactctttcttctaagaagcctttcattaatagtattaaacagattagaaaaattataatctgaagctttctctgttccaaggtcgtcaataataagaaggtcacactcaacaaaaaatgcagtgtcaaacttggaacttccaaactccttaaaatcatcgctcttgaaagaatcaaagaactcaccggcagtaagataaataatactgtggcaggagtccataagcgcccttgcaatacagttagaaagaaaagtctttccaacaccggtctgtccgataaacaaaagattagaaaatgtattatcaaagttatcaacgaaatcgtgacatactttgagaaccttctgcatattaatataaggtgtgagccctgttgcaggatcaacatcagtgttgttgtaccagctaagagaaaatgtatcaaaattctcatcagcagttatattcttgagattagagtccttatatataaggtcaatagccttcttattaaaacatatgcagcgcttaccgtcgacataaccggaatccttgcagtaaggacatgtaaatatatcatcaagataatcagcaggcttgcctattgaagccagggcagccacttttcgttcgttaagtgacttaaggctggaagccagttcatcagtatccgtgtccgatgaatcggcttctatacgcgctctggcagttttcatggacaggtcaataatctcagaatcaatatcggcaatatcagggcacagggcagtgacttcgttataacggtcactctgcatacgcctgttggcagttttaatatcatcatacagtctcatgatagaggtatattgtgtattggtcaaaggcatagtgcccctccttgtaatataattagttgttgttgcttaataaagagttataccagtcgtcagacttcttaggacgctgctggtagttgttaaaacggttggcattctgacggataacattaccggacttagatgccttggcagccttgccggcttcgaactgttcatcagcctttcggacatcctcagaatttctgatgttggatgtatgccacttcgtaagtattgagtcggcatattcgaagcttggctgatgtgtagctttcattgttctgttgcatgcttcgataatcatgtcagtttcaaagcagaaaacatcagtccacttggagataagctgtttctcaacctgacccggttctctgttgttaagaccaaatgccttcatgacaccgtaaacagcctcattatggttggatacctcgtccttggctgcctcaacggtattaataccttcgtcagcccatgagagagcaatcttctctatgtatcttatagaagtcttacccttggatacacagtattcaataaggtattcgataaggtcagcaggaaaatgcagagtgtcatagaaatacacaatagcattaacctcaggctgagaaagtgtcttgccaagatatgtctgtattacaaaaagcagcatagaaaaatcatcgttagagttaagttcatccagcttttcagcaggagcagttacctttgaaggctcaacagtatgtgatggtgctttaatggcaaaatccatagaaacaacatttgacgatacatctgaagcagaattacctgaagcagcctcatcagcggaaacttcatcggcgaaagctgcggcaggaactgtggtatcagcagtgtcattattaacttcaggtacagtatgtacatttctgtcaggctcaggagaattatccttaagatccttcacggtaatgccgcagagctggttgttatcgtcataagaaagactgacgagcccagacttgtcccagtatcttaaagcacgcattacatcattctcggtctggttaaaagtatcagccagggaagaaatgcttaagttactgttctttcttgtaagaagcctcagaagataaagatagaccttaacaaagtctccgttggctgatggtacatattcgtctataaataaatcagaaactgctgtatagccagaaacagtctctgaatacaagttcagattattcatggtattagtctcccaaaaaagttatgagcagattataccactgaaaaaaataaatgcaaagcgcgcccagtgcggaaaggagaaatgtggaaaatgtggaaaatgtggataagtaaaaaataaacgtaggaaaaacgcatagaatctggattcttaaaattaccagaataaaaaattatccacaatcattctgaacaattaagtaacagaaaattgtggataatgtggataactttgttgaaaaaattcaggctggtggaaaatgtactatttaagcaagtcttcaccaatctgatatacgtcaccggcacccatagttattaacaagtcaccgttgatacaattttttaataaatatttttcgatgtcctcaaaattgtcaatgtatacacattccttaccgagagacttaatcttctcgcacaggtcagcagagctgattccaagcgtatcagtttctcttgcagcgtatatcttagcgagaacaaccttgtcagcgtggcttaaagcgtcagcaaattcattgaataaaagcttcgtacgcgaatatgtatgaggctggaaaactacccatacattgttgtgtggatagtgtgcagcagagtttaaagtggcacggatttcatcagggtgatgggcataatcatcaataactgtaactccgttaaatgtacctttcttctcgaatcgtctgttagtacccttaaagttagaaagaccggctttgatatgttccatatcaacagaaagtttttctgcggcggcaatggcagcgagagaattgtatacattgtggagtcccggaacaccaagagtaattgtgtcagctttctcaccattgataagaagcgaataagtgcatcttccaagttcgtcataagtgatatcagaagcactgtacatgctctttgcagggtcagaaccaaatgttatgacctcgcagtcagtatcctgatagaaatattcataattatcaatgtcagtattgatgataagagttccgtcagatggaagcttttcagtaaaaagcttgaaagagtgacggatatcatcaatatccttgaagaaatcaagatggtcttccttgacattgagaataatgttcattgtaggattaaaagataaaaagctgttagtatattcacatgcttctgctacaaaatacttgttaccgccgactcttgtattgccaccaatgctgttaaggatacctcctacagagatagtaggatccatattggcagcaagcagaatctcagaaaccattgaagtggtagttgtttttccatgagtacctgcaatgttaatagcattcttgtagatagtcataatctgtccaagaagctctgcacgggtaagcattggaagccccgcttccttagctgccttgaattcgggattatccgggtgaattgctgctgtatatacaacaagatctatatcattagttatattaccggcgctctgtggtacggatacgatacagccgtccccgataagttcgtcagtaagagctgatgagtgagcatcagagcctgaaacagtaaagccttcagataaaagaatcttggcaagtccgctcatacttataccgcctatgccaatgaagtgaatatggatagggttgttgaaatcaatcttgtacatgatattttccttccttgaaattagtgtttaatatattgtatgtcttatcggcttatttttcaaacctttcttattatatactatacgatttagaaaatgtgcataaaaatgtgtataaaaaactcgaaattctttttacttaatgagaatagtatgatataatcaaaatatctaaaagcagtaaaaatttaacatcagaggtgatagcatgattaaaaaagaaatgattgcaatgctgttagctggtggccagggaagcagattaggagttcttacttctaaggtggcaaagccggcagtagcatttggtggaaagtatagaataattgactttcctctcagtaactgtattaactcaggaatagatacagtgggagtattaacacagtatcagccacttcgtcttaacacgcatataggaattggtattccttgggatcttgaccgtaatgtaggaggcgtatcagttcttccaccttatgagaagagtcagaatagtgaatggtatacaggaacagctaatgccatttaccagaatcttgagtatatggagcagtatcatcctgaatatgtacttattctttcaggtgaccatatatacaagatggattacaagataatgcttgattatcacaaggctaataatgcagatattacaattgctgcaatgcctgtacctatagaagaagcaagcagattcggtgtggttgtaactgataacgataataagattacagagttcgaagaaaagccagaacatccaaagagcaatcttgcatcaatgggtatatacatattcagctggaaggttcttaaggacgcacttatcaagcttaaggatcagcaggaatgtgacttcggaaaacacgtaattccatactgctttaataacaataagagaatatttgcttatgagtataatggatactggaaagatgtaggaacattaagttcatattgggaagctaatatggaacttatagatattattcctatatttaatctttatgaggaattctggaagatatacaccaagacagatacaatcccgccacagtatattgctaaagatgcctatatagagaagagtatcataggtgatggaactgaagtatacggaagagtatttaattctgtaataggttcgggagttgttattgaagaaggctgtgtaatccgagactcaattattatgaataattcacacatcggaaagaacacaacaataaccaagtcaataatcgcagaagatgtaacgattggagagaatgttgaacttggagttggtgaagaagcagagaatgttaagttccctaagatatataattctggacttgttaccgtcggtgagtggtctgttattccagacaacgttaaggttggaaagaatacagctatatcaggagagacaacattacaggattatcctaatggtgagttaccaggcggaggcataataattaaggcaggtgataattaatgaaagcaataggtattatattagctggcggaaataacagaatgatgcgtgaactttctaataagagagccattgcagccatgccgattgccggaagttatcgcgccatagattttgcgttgagcaatatgactaattcaagaatccagaaggttgctgtcattacacagtataacgcaagatcacttaatgagcatttaagttcatctaagtggtgggattttggaagaaagcagggaggattattcgtattcactcctacaattacagcagagagcagtaactggtatcgtggaacagcagattcattatatcagaatatgcagttcttaaagcagagccatgagccatatgtagttattgcatcaggcgatggtgtatataagctcgattataataaagtacttcagtatcatattgagaagaaggctgatattacagtagttgtaaagaatctggaagatcgttctgagataggacgttatggtgtagttgccatgacggaggaaggaagaatcacagatattgatgagaagccattagagactaatctctctacagtttcaacaggaatatatgtaataagaagaagacttcttattgaacttcttgaaaaggctgctgaagaagacagacatgagtttgtaagagatattcttgtaagatataagaatatcaagaagatatatggctataagcttgatacatattggagcaatatatctacagtggatgcatattataggactaacatggatttccttaagaaggatgtaagagattactttttcaagcagtatccggatgtatattctaaggttgaggatttaccacctgctaagtataacttcggagctaatgtaaggaacagccttgtttcaagtggatgtatagtaaacggaactgttgaagattcagtgttatttaagaagatatatgttggtaataacagtgtaattaagaactcaattattcttaacaacgtatatattggagacaatgcatatattgagaactgtattgttgaaagcaatagtacaattaaagctaattcaaggtatgtcggggagaatggtacaaggattgttgtggaggacagccctttgtattattaagaataaaagttgcaacagaaggttttcagactaaagtataacaagaaccgcataggttcaagaaggggtgcgttatgaatataacagatgtaagggtaagaaagattgctaaagagggcaagatgagagcagttgtgtcaatcacaatagatgatgagttcgtggtacatgatattaaggtgattgagggagagaagggcttgttcattgcaatgccaagcagaaaatcatcagacggagagtatcgtgacattgctcatcctatcaacactcagacaagagataaactgcagaagcttgttcttgaggcctatgataaggcggaggatgtagaggagtaacaatttaacacatttaaaaggtctgactttgacagatgcgttagcgcattttcagagtcagaccttttttatgcaatataaccttttgcttccctgaatttgacaggggaaataccttttgttttcttgaaaacatccccaaaataattaccggattcatatccacataatgaagcaacatctgacattggaagattggtttcaagcaataatctttcagcatggctaatccttattctattcagaaaatctttgaatgtcatttcggtttcatctttaaaaagcttggacagataagaaggattcagatgtaaatgttcagccaaagcggtcaaagaaatattggaggaaaagttctgttctatgtaatcaatggcattctgaataattgtattctctgtttgtaatgagttcctgacatttaatgacgctgttatatcaaaaccagaacggattatacacagaataattccctgaattgaatgccttatagttaatgaagatatagaactgtgttttttagattctaaaagaacagtatcaaaataataattaatcaggttagatgctgacagattaaaagtaaagaaatgacagcagtatttattataaaaagttaagtcggggaaacctgatataattggtgctacatagtcgtctcctaattcaattacaatccgctcattatctgtattagaatatatggttttatgagaaatatcacatggaatcaggaaaatggttccttcgtttatttcatataaagcatctcttattaaaatgctgcagcttcctttggtaaggtaaaataattcccagaaagagtgtgtatgagaagatgacattgaattttctggagtgcgatataattttgaaatgttaaaataatttgaattcatacattctcctgaagttatatttaaagatatattaacacagataaatggaaaaataaatggattaaaaaacggaaaattttagagcaaaataagtgcaatatatacattttgcacaaaaaacatgttgaaatattgctgtaattaacaaatggttaaaaaatcaagccaaaattatatgtaaaaacaactcaagaaacaaaaaaagcggtagcaaaacacattacataaatgtattatggtaacaaaagcggaaaactaccgcgaaagacactatcgtgtgcaaatatatttaaggaggataattatgaagtttatgaaaaagcgtaagatcagaagaattgcatcattattcatggcggttcttatggttgcagctctcatgccaggcagtattactaatactaaagccgatgataagaccgctgaatctggggtcgtagtagacgctggtacatgggagaataacgaaagaacaacaacctgggatttttcaaaatactcaggaagcagttcacttactttagcagaaggtgatgaggttggcagaataaaggttgctgccggtacagcatatgttaagactaaaggagcaggattatcagctcagaaaacaaaggatgctgttattgctgttcctgttgacccaacagcaacatcagctacacttacacttgagttttctagtaacaacaataacagatatgtttatgttggcgataagagcggagagaatgcaatcatctgtctgaatacagcaggtagagaggaacttcctaatgctgttaatatcaatgctgataaagtagctacagtaacagtttcatcagcagcttttgaggatggttatattttacttacaccagatacacttgcaagcggtgattcaggtgagatgaagattaagaatttaactttagtagaatcaaaagataacggagacagaacatggaacttcagaaaaggttctgaattaatgggttctaacggaaagctcattcaggaaactacaggtgaagttaatggcttagttattgatgctacaactggtaagtttgattctacaagaagtgactgggcacagtttaacacaggagctgttgttaagattccggttaagggttcatgtgaaatcacaattggatcatataaagagaagcaggctacaattgaaggaacagaagtcagcactacagaattcaagtatcaatactcaggtgcagcaggatatgtagaattagttgcaacagctgatggatatcttggaagcattgatgtaaagcatattgcagagccagaagctaatgtagaaaactttacatttgttatggacgagcatgctgtagatggtgttgttaagactggtgagtacaagttcggagacagcacacttacattaggtggacagacagtaggcggagttattactcagtatacagtaaagccagataagaaggttacaattaatggtgttgaacatgatgcttatacatcaggtaagagacatgctgatgccaataatattcctaatcttccaggagagggtgatggatgtttagctacatttacaccagcagctaagggtatgatgacagtttactataactcaacttcattcctcagagtacatactttcaatgctgatggaaccaaggaaggctatgttgattcagaaacaggattaacatcatattcatttaaagttgttcctggtaagacatatgttatgtcaacaacaggaaagactaataatatgttctatgctggatacagctatgttgcagatgagaagattacagttcctgtaactgtaaataatattgatgcaacaattggtagtggtttaaagttatcattagtagatgaccagttaggtggagataagatatctctcagcacaacaacaaaatctcttaagcttcttaagggacacacatacagagtaagttctaacgatggcggtgttaagccacttgtaggtgattcacagacatttacagtaacaggtgatgcagttacaatcacacttaataatgttccggatgttgaacttacaggtaagattacaggtacagatgcatctaatgtaactaagcttgtatttactaataatgctagtggaacagtaaatgaagcaacaataacaggagattcatacaaggtttctgtaaagcctggagaatatacaacaagcgtagagactaaggatggatcaacaacatatgacagagcatccgttaaggctggtgttgataatgttaatgatgtatatgtagagaaggatgatccagcatctaagagagattacagctatacaagagttccatctcttgcaacagcaggtagtattgcagtagagaatggaaagcctcacacagtagcaagagctgattcttcacttacaattccagtaaagggaaaagctaaggttgctatttctacttactatgcattcaactttacagttaatggggagaagtacgatagtacagaaactgataagggctatacatcagttggtacaacatctaagacagatacatttgagatagtagttgaaggtgatgctgttgttaactttggtgcaacaacatatattacaggaatttcagttgttcctatgacagaattcaagtcagagattaatgttcctggcgattatgatacattaaatgaagcttcagatgctattcttggtatgcagaacagaccagaaggcgaagcaggcagagtaactattaaccttacatctgatgtatttgaacaggtagttatggctgcaccatatgtaacacttaagggtaatggacatacaatttcatggtattatggtgttggaacaaagtattattcaatagatccagcaacaggtctttacaataagacacttgctatggacagatactcatctgaagaaggaaatggaagtctctggggtggagtattcattgttagaggtaataattttgttgcagagaatacaacattcttgaatacatacaactattacttaacagaggctgagaagacagatattgcaggttcaaatctttcagtagacagattagcagaaggcgcagatgtatcagattacaagtttaaagagagatcaaatgctttctatattgatgctgataatattgaagttttcaactgttcaattctttcatcacaggatacacttggtagaaatggttcagcaaattatggatatcacgcatatttcaacggttgtacaatcggtggtaatgtagattatatctgtggtgagtttgcagctgtatttgataactgtaagttacagtggaagacatataagaatgatgaaaataacaatgcaaagattggttacattgttgcacctaagacaagcccatatgtattcagaaactgtgaggttacaacagatggagcacatggtgatatagcagtattaggtaagtatggcagaacatggggtgctaactctaatgcatcatttattgagtgtgagactaatggatacattgactcagaaggctggacagaaatgtctaatggagagaaggcttcagcaatcttcaatgagtacaataacacaaacaagggtgaagcatttgtgacaacaggctgcactaatagtacattagatgctgttgttaattatattgattcagaaaatgtttctgctgttgatacagttcttggtacatggaagccagttcattataaagaagttatctctaaggatgacgattcatcaaagggtgatgtagcagacggtggagaaacaggaaaagacaataatgttaatggaacaacagagtcaacaggtgaaactgtaaagactggagatacagctccaattgcattatatgtagtattaatgctttgtgcattagcaggaattgtatttgtatcaaagaaaagaagaatatctgttaaataattataattaaataattgtttaatataacaaaaagtcccgcggtcgttatgacttgcgggactttttggataaagataaggttgtcttaacctgtcaggttacagatgatgcgttaagatagccaaaagaagaaatatgttatatacttgctaatatatgataattaatcaggaggatgttatgtatataatagcgggactgggtaatccgggtaaagaatatatgggaacaagacataatgcaggcttttcagtaatagacgagcttgcagacaaatataatatcagtgtggacacagcaaagcacaaaggacttattggaaaaggtgtaatagcaggtcagaaagtaatacttgttaagcctatgacatatatgaataattcaggcgagtgtataagagaagttatggattattataaatgtgacatagatgattttattgttatcttcgatgatataagtcttgacgtaggaaagttaagactccgtgcaaagggaagtgcaggtggacacaatggaatcaagagtataatagcacatcttggaagtgacaagttcaagagaataaagttcggagtgggcgacaagcctaagaactgggatcttgcagactgggtgcttgggaaatttcctacagaggaatatgcaacattaagagaggctaataagaaagcctgtgaagctgtagaatgcatacttacagatggaatagaaagtggtatgaataaatataacggataactggtggtataatatgaaagcaatatttgagccggtgtataatacagccggtgtggaacaacttaataaagagcttgctaaagatggtggcagaacagtaatggtaagcggctgtattgacacgcagaagctgcatttttcaagtgctatagccagcaattataatttccagcttgttataaccagtgacgaggggaaagcaagggatatggcggaggatgccagattctttaacggcggaaatgtaatgtattatcctgcgaaggatgtaatattttataacgcagatgtgcagggacgacagattgccggagagcgaatcagatgtatagcagccataattgacagattgaataaatcggacattgtaaaatctggaacggagaaatcaacagagaaagcttcagacggaccgcttacaattgtgacaaccatagatggaatatcagatatgcttcttccagtcgacagattcaagagggcagtcattaaccttaagaagggtgacatactcgatgtagaggatatggcaaagaaacttacagctatgggattcgagagattcggaatggttgaagccaaaggacagtttgccataagaggcggaataatagatatattttcatatacagatgaagcacctgtgagaattgaattgtgggatgatgagatagactcaataagggcgtttgatgcagacagccagcgttcgattgagaactataagagttatacagtatttcctgcaacagagttcctttttactgaggatgaaatagagcaggggattgaaaaaatcagacatgaaaaagacgaacagatgaagctgttcggagcagataaaagaaagcgtactaaggaacagatagaggctggcaatcatcttaacagaatgtttgatgacgcgttaaggacaggagattacagcaaattcatatatacatttgcagacagagtgagcagcctggcagagtatttccctaagggagatactcttattgtcgtggacgaacctgtaaggcttaaggaacacagcgacatgactttctatgagtacagtgagagtatgaagaacagattagaaagtggttatgtgctaccaagtcagacacatatgtttatggatatggagacagccgttctttcaatgaacggacataagcagcttgtgcttacaacacttgaatacacacctgaattctttgggatagattattcaatgcatattgaagcgagaagcataagctcatataataacagctttgaatatctttcagatgacataaggaagtacaaacgcagtaaatacgcagttcttcttgtgtgcagctcaagaacaagagctaacagaattgttgatgacctcggaaggcttgggattgagagcttctatacagaagacagcaataaatccatggcaggcggacttgtgatggttacttacggaagtcttcacaggggatttgagtatccattgcagggatttgtgtgcattgccgagaatgacatatttacagagaagaagcgcaagaaagtaaagaagaaggagtacgatggcaagaatattgccggctttaatgaacttaatattggcgattatgttgttcatgagaattacggtataggccagtacaagggcattgagaagattaaggttgaaggtgttgagaaggattacatcaagatatcttacgcagataacagcaacctttatgtgctcgcaacacagcttgaccgtctgcagaaatttgcgggttcagatgtagagaaaaagccaaagcttaataagattggcggttcagagtggggaaagaccaagtcaaaggttcattcagccgttgaagaagtggctaaagaccttgttgagctgtatgccacaagacagagaatagaaggataccagtttggaccggatacggtatggcagcaggaatttgaggaaatgttcccttatgaggagacaacagaccagttaaatgcgatagaagacacgaagcatgacatggaaagccgcagggtaatggacagacttatatgtggagatgtaggctatggtaagacagagattgcgataagagcagcatttaaggcagttcaggaaggaaagcaggttgcttatcttgtaccgacaacagtacttgcaagccagcattttaccacatttgaacagagaatgaaggactttccggttacggtagcccagttgtcaagcttcagaacctcagcacagaataaggagactattgaggaacttaagaagggcatggttgacattgtaataggcacacacaggcttctttctaaagacgtggtgttcaaggatctgggacttcttattattgatgaggaacagcgttttggtgttacacacaaggagaagattaagaagttaaagaataatgttgatgtacttacgctcagtgccactccgattccaagaacgcttcacatgagccttgcgggaatcagggatatgagtgttcttgaggagcctccggttgaccgtgttccgatacagactttcgttacagagcataatgatgagatgatacgagaggcaatcacaagagagcttgccagaaacggtcaggtatactatgtatacaaccgtgtaagaagcattgatgaggcggctgcacacattcaggagcttgttcctgatgcaaatgtggcatatgcccacggtcagatggctaaacgggagcttgagaagataatgtgtgatttcgttaatggtgagatagatgtgttggtgtctacaactataattgaaacaggtatggatatatccaactgcaacacaatgataattgaagatgcagatcgttttggactttctcagctttatcagctaagaggaagagttggcagaagctcaaggactgcgtatgcatttttgctgtacagaagagataaggtactgacagaggtagcggagaagcgactcagcgtaatcagggaatttgcggattttggttcgggttttaagattgcaatgaaagatctggaaatccgaggtgcaggaaatgtgcttggaaacagccagcacggtcacatggcggctgtaggatacgacctgtactgtaaaatgcttaatcaggcggtcaacaatcttaagggaattaagaatgagtatgagtttgagacaacaatagatgttgatgtggatgcttatattccggcaacatatattaagagtgagtatcagaagcttgatatatacaagagaattgctgcacttgagaacatggatgaattatcagatatgaaggacgagttatcagacagatacggaagtgtgccatcatgcgccgacaatctgcttatgattgcgcttatcaagtcaaaggcacataaacttggcatgatagggataaagggcggcgttgcacatcaggaatcaggaacagcagtatggcgtacagttatgacagtttatcctaaggctgaattagacccggatgctataaagaagctgcttgatgagtatggcggtgcaatccagatgagggtagacgccaatcctgcattcatatggactgtaacaaagaagaaattcactaatgcaaaggaatatcttaaggggcttaatacgttgatggatgtgtttattgagagactgatggtgaagtaagatttaaattgatttattttaatttaaatcaaatttaattcaattttaactcgactgatataaaaatacgagttataattcaattaaacttaaataaaggggtaatatttatgcggacaattccaattaaagaaagtcttacaattgaatttaaaagtgataaaaagaaatattctgatgctgatctggttgatgaaattgttggtatgacaaatacaaaaggtggtacattgtatttgggagtagaggataatggagaagtaacaggtgttcatccaaagcataaggacgcaataggagttactgcattgattgctaatagtacagtaccatcagtttcagtcagggcagaagttattactgaggaagaaaaagatgttcttaaaatagaaattccagttagtagaacagttgtatctacatcatcgggtaaaatgctacgccgtcggttaaaagcagatggttcaccagaagtgattccaatgtattcatatgaagttgtaaccagattatcagagttagcattattggatttttcagcaggaccactggcgggagcgacaatagaagattttgacccaaatcaaaggattcgcttaagaaacattatacagaataaaccgggtggagaaaaaaatcttttaggattgcaggacgatgaactggataaagctctcagattaacaacagaggtagacgggaaaatatatcctacggtgacgggaatgcttcttattggaaaagagagcagcatagaaaaattaatgcctacagcaaaagcttcatttcaggttttagaaggtacgaaagtaagagtaaatatagagacaagtggtcctttattggaagtatttgaaaaatttgaaacatatgttgatgcatggaatcctgaacgtgagattgaatatggtttatttagaacagcaatacctgaatttgataaagcagcctttcgtgaaggtttaattaatgcattttgtcatagagattatacaatgttgggaacagtacgtgtattaattgatgatgaaggaatgacaattagtagtccgggtggatttattgatggcgtttcggtggataatctgttgacagtcgaaccacatggcaaaaatcctgcattagcagatgctcttaagagaattgggctggcagaaaaaacaggacgcggaatcgatagaatttatgaaggttcaattatatacggaagaccgtggccagatttttcagaaacaacaagcacaaatgtaaaattatttattcaaagggcgaaagcagataacagatttacaaagcttattgctgatgaacagaacagattggggaaaccattatcaatttattcactgatgatactttcacttttgaaaaatgaacgaagaatggatttggcaagagtagtaagcatgacacatttaagtgagagcaagattcgcagttctatagaaaacctgatagaagatggattgattgagggaagcggaaacggaaaatcccgtacatatacactatcaggcagagtatataaagaaagtaatcaaagtatccagtatgttcgacagactgggatagaaaaggttgcatatcccgaaatgatattgaaacttgccagaactcaagatggtattattacaaaacaagatgttgcagaacttctaatgattacgccaaatcaggcatatagcgagataaagaagcttgtttctgagaaaaagttatataaatattgtggtggaaagtatacaaaatataagatatgttaatgtaagttaatgttgacaataataacagatgtgttataattcaaaacagtttaacgctttaaagcgtaacggtttaaagtgaaacgattctaaatggaaatatttccagaaggaaactttttaagaggaactttttaggaggaaacaggttatggcagaaaacaggggtaatttgacttcatacagaccagatatcaaggttatggactgtacattaagagatggaggtcttgtgaataattttgaatttacagatgagtttgttaaagatctttatgaagctaatgtggcagcaggcgttgattatatggaatttggatataaggctgataaggatatatttgatgagaaagaattcggaaagtggaagttctgtaaggaagaagacatcagggctattgttggagagaatgatacaccacttaagatatcagttatggctgatgtcggaagaactaatatgaagagagatattccacctaagtcagagtcagttgttgatatggtgagagttgcaacatatattaataccattccggcagctattgagatggctaactactgttcagatatgggatatgaggttacagtcaatattatggcgatatcaacagcaggtgagaacgaattagaccttgcattagagcttcttgcatcacagagcaaggcacagtacatatatcttgttgacagctatggttcattatacccagagcagataagaagacttgctgacaaatacataaagatagcagagaagtatggaaagagcgttggtattcatgcacataacaatcagcagcttgcatttgccaatacaattgaagcttgttcaatcggcgtaagccttcttgatgcaacagtgagcggaatgggaagaggcgcaggtaactgctattcagaattattgttaggtttcttaagaaatcctaagtttaatattgttccagtgcttaagtttattgaaaagcatatggttccacttaaggcatcaggtgttgtatggggatgtgatgtacagtacatgcttaccggtcagaccaaccagcatccaagaacagcaattgcatttactaaggcagaaagaaccgattatgctaaatattacacagaaattaccggagatgagtaatgaaatgttgacatgacatttttaagagcgtaaaatatgctcaaaatcgtgtaaaaacattttttacattggtatctttagatgaaaggaagtactaacaatggaaaagaagaatattgattggtcaagccttggctttggttacatcaagactgacaagagattcgtagccaactataaagatggcgcatgggataacggaacacttacagaggatgacaaggttgtcattaacgagtgtgcaggtgtccttcagtatgcacagacatgttttgaaggtcttaaagcttatacaacagaggatggtcacattgttatgttccgcccagatctgaatgcagcaagaatgaaagattcatgtgagagacttgagatgccagtttacccagaagataagtgggtagaggcagttgctaagacagtagaagctaatgcagcatgggtaccaccttttggttcaggtgctacactttatgtccgtccatatatgttcggaagcaatccggttatcggagttaaaccagctgatgaatatcagttcagagtacttacaactccagtaggtccttacttcaagggcggtgctaagcctattactatcaaggtttcagattttgatagagcagcaccacacggaacaggacatatcaaggctggacttaactatgcaatgagcttacatgcaattatgacagcacatgaagaaggatatgcagagaatatgtaccttgacccagcaacaagaactaaggttgaggagactggtggcgctaacttcattttcatcactaaagatggtaagttcgtaacaccaaagtctaattcaattcttccatcaatcacacgccgttcattaatggttgttgctaaggaatatcttggattagaggttgaggaaagagaagttctctttgatgaagttaaggattttgcagagtgtggtctttgtggtacagctgcagttatctcacctgttggtaagattaacgaccatggtaaggaaatctgcttcccgagcggaatggagaagatgggtcctacaatccagaagctctatgatacattaacaggtatccagatgggcaagattgaagctcctaagggatggatttacacaattgcgtaattcgtattattaaaatatttattcggtctggacaagtgttcaggccgattttttaattttctaaagtagattttacattgaaaatgtgataacatactaatataacagacgttagtaaagaggtgcagcagtatgtcagaagtcggaactaatgaacgtttattgcgttctgatgtaacattagaggaaagcagaaagatagagagagttcttagaagaaacaatatatcatattttgagaagtggaatttccacacaggcgtgttcaagttccttaataacagcaagaattctaagtgcgatatatatgttcatatggattctatggataaggctaaggaattgcttgctgatatgtagaatatatttataacagaatatgtctaagataatggtcagagtgatttactctgacctttttttatgctataattttttcactttgtgtgaaaggatagaaattatgacaaagaaaaggatagcattgaaaatagtaaggagggtaggaatatgtattcttaccacagtggttctgcttctcataggactgtttggcgttgtaagaattatggaattcggaccatcaaagacagcaagaaatctgtttgttaattcagcaatggaatcaagtgcaggaggaatacttgtaacactatttttttcagatgaagagatagccagaataagagcaatcaattccatacagaagacagatgaagtgacagattcttcgcttatatcagatacaacaattcttacacaagaagaaaaatcaatgatagaggttattgatatagagaaggatacttacagaggtaagatgatgattgtaagagatccatcaagagttatggtaggaacaagcggagaatatgggaaaagctgtaagggaaagaaagtatcagagatagcggaaagctatggcgcaatagctgcgactaatgccggcggttttcgggatgcaggaggagtaggaacaggtggcgagccggatggacttgttatatcagaaggcaggttaaagtgggggtcactgggaacaacttatggaattataggtatagacaataataatgtacttgtagtgggagatatgacagcacaggcggcacttgaccggggagtaagagatgccgtaagcttcgggccggtgcttgttgttaatggagaagcggttgaagttaatgggagcggaagcggtcttaatccaagaacagcaatcggacagagagaagatggttcaatactgcttgtagtaatagatggacgccaggtaaacagtctgggagcatcatattcagatgtgatagagctcatgcttgagtatggtgcagttaatgcggctaatcttgatggtggttcatcatcacttatgtattacaatggagaatacatcaacagttgtgcatcaatgtatggaccaagagatttaccgacaacaataattgttaaataaatgtttaaaaaggggcaggccggaggctgagaaaataatgattaaaaagacaataaaaatcccgttattctggaaaatatatataatagttgtcaccatagtactgataggatttgttgtactgtggagcatcctgtggacagctttaaaaaagtatgagcagtcacgaccagagtatgctatggataagataactgaacagatacaattacaggatacaggagatttcacaaagtatgtacacacgggggaaaacgcttatgaaggcagtgaagcgttagatgaagctgtgagagaatatattaaaaatgtattatgtgagggagcgtgggcatacactaagaaatctggtgagtacactaatgataatccagtatatcagttaaagaaagacgggcagaaaacagatatagtaatatatcttgagaaaaaaagtaaaaatgagtggacaattgcagatgcgtcaggacttagctgtgaaggaaagacctatgagataatagttccggagaattcagaagtgacagttgatggtaataagctaggaagtgaatatgtaacagaaactaaagatgcagaagtactaagtaatgttgccaaacacattaatatgcctaagacaacaacatatcatatagagaatgtatataaagaacatgaaataaaagcaacaggtcctgtgtataacagtgaactggagcttataagcagcacagataatgtatatgaatttggatttgaagctaatggcaagctgatagaggaacaggaaagctgtataaaagaaattacagaaatttacggtaaatatgtagttaattatgaaagctttgcaaagctttcaccatacatactgcctggctcatatgcatactcatacctgtccagaatatcaaggactaatatatggttagaagtaagcagggaaccagcatttagtgatatgaaagtatataattaccagtcatatacaaaagattgtttttcatgtgaagtaagttttgatttacaagtatcctataacagtggcagtttcaaagattaccctactcatatggagtatatattcgtaaaaagaagcggcaagtggtatatagcggatatggtgatgttgaagtagtatagacaacggtattccaccagctcgtctgtatatggcttacgctctcatggattactgcgcttagtgggagtaaatgacgtcatctgcaaaggctattactgtgagcgaaagcaaacgcgcttcgcttgaacgagctttcactcacagaccttatgcatataacggcattaactcccacacagctcgtaataaatcgagcgtgagtcatatacagacaatcaggtggaaatatgtattgtctgatacatacttccacttgatgtaattattaagaatattctatttactcactatcctttggcagcgactgcatatactgatgcattgattctgccacaatcttgctgtgtgcgacagcttctactacggttcttgcaccgtttacaacatcacctgatgcaaatatacccggacggcttgtatggcctgtctcatcagcatcaagaagtccccttgcagtggctttaagacctgttgttgtgttgacaatacgattatgcggtccctgactgatagagatgataacactgtcagagtgatgcagagtgtcagttccttctatgtcagtgaaagttccgtcctcgttctcaataatatctctgaatataacaccatcatccttaatctcaacaggacgtttattatattcaaatgtgattccttcaagctgtgcgtagctgaattcatatttgctggcagcgacctctttagtgattgagaaacagatgacattgcgggagccttttctcttggcagttcttgcaacgtccatagcggcattaccggcaccgataacaataacagtttcgccgaggtggtagctgtctgggttattgaggtaattgataccaaagtgtacattaccaaatgtctcgcctttaatgtgaagagagttaggcttccatacaccagtaccaatgaatatagatttgtagccgtcgcggaacaaatcatcaattccgatggcaccaccgatagtggtgttaggacgaattttgattccttttaaggcaagatgtctgtattcaatgtcgtcaagaacagtcttaggaagtctgaattccggaataccgtatcttaatacgccgccaatcttgtcctttccttcaaatatagtaacctgatatccgtatcttgcaagaataattgcaatagtgataccagcaggacctgaaccgatgattgcgactctcatgccgttagaaggcttaggaccttcggtcatctggttggcatatgtacttgagatataattctcaatagtagaaaaatgtacaggagcgccctttcttccaagtacacagtgaccctcacactggttctcatgattgcagataagactgcacacggtagtaagcgggttgttctcgaaaagcattttaccagcttcgttaagcttattctctttaagtaaatggattgccataggaatgttagtgttaataggacatcccttctgacactgaggcactttgcactgtaagcaacggttagcctcgtccataacatgtaacgccataatatatccccctttaaagctgttatatagtagattgcatgtgtgcgtccggtaggccggctgtccggcacctgtctgtggtgcaggaattcagtgtgtctcgcttagcaggagtaaaagccgctgtctgcagagtctattacattgcacaaaagcaaacgcgcttcgcttggacgagcttttgtgcaatgaacttatgcagacagcggcttaactcctgcacagctcgtcacaattcattcctgcgccacagacaggtgccggacagccggatacacacgcgcaaattaactaacttaatcatagcattttttgggttggaattaaaggggaagtttgacaaaagcgtggctgaaaggcgggctgttttatggatttttttggcaaaatatagtatgatataatttaatgaaattgcatgctgtcgggggcagcagggaaggaattattatgccagttacagagtacttagagcgcaatgcaagagaatatccagacgaggttgcattggtagaactcaatcctgatgagaaggatacaagaaggatgacatggaaggagttcgggcttattgagcctacaacttattcaccataccgcagagagattacatggagtgtgtttaacgagaaagcgaacagattcgccaacatgcttattggcagaggaatcaagaagggcgataaggtagctattattatgtataactgccttgaatggcttcctatatatttcggagtgttaaagacaggtgcgatagcagtgcctttcaacttcagatatgattcagacgaaatctattactgtgcagagcttgcagaagtagatgttatcgtatttggaccacagtttatcggacgaattgaggtaaatgctgagagattatcaaagggcagactccttatctatgttggagacaattgtccaagctttgcagaaagctacagagagcttgttgctgactgctcaagcaaagcacctgatgtgactataacagaagacgattatggtgcaatatatttttcatcaggaacaacgggatttcctaaggctattcttcataagcacagaagccttacacaggctgccgagatggagcagaagcaccatggaacaggaagatatgacacatttttatgtatcccgccactttaccatacaggagctaagttccactggatgggaagtcttgtggcaggaagcaaggcggttcttcttaagggaactaagccggagacaatacttaaggcggtttcagatgaagaatgtacaatcgtgtggctgttagtgccttgggctcaggatatattagatgcactcgacaggggagatatcaagttatcagattacagacttgaccagtggcgactcatgcatataggtgcgcagccggttccaccttcacttatcaagagatggaaggaatacttccctaagcaccagtacgataccaactacggactttcagaatcaacaggtccgggctgtgtacatcttggtgtggagaatatcaataaggttggtgctatcggaattccgggttacagatgggaatgtaagatagttgatgaagacggtaatacagtaaaacagggagatgtcggagaactctgtgttaaaggaccgggtgtcatgacatgctattaccgcaacgaggaagctactaaggaggttcttaaggacggctggttatatacaggtgatatggctatgcaggacgaggacggtttctacttccttgtagacagaaagaaagacgttatcgtaagcggtggagaaaacatatatccggttcagatagaggacttcatcagaagatttaataaagttaaagatgtagctgttatcggacttccagaccacagactgggtgaaaagacagcggctatcatagaagttaaggacggagtgacatgtacaaaggaagagattgaagatttctgtatggaacttcctagatacaagcgtccgaaagagattatatttgcagatattccgcgtaatgctacaggaaaaattgagaagccgaagcttcgtaagatgtacggcgcagacagacttgtagaacaggaaaataaaggctgataagaatacatagaatggagaatgttatgagagaattaatgctgggcaataaggcagttgcaagaggaatgtatgaagcaggctgtaaggtaatatcaagttatccgggaacaccaagtacagagataacagaagaagcagcgaaatatgatgagatatactgcgagtgggcgcctaatgaaaaggttgcattagaggcagcacacggagcaacactcggcggagtaagagcagcatgtgcaatgaagcatgttggtttaaatgtggcagcagacccgttatttacaatatcatatcagggacttaacgcaggacttgtaatctgtgtagcagatgatccgggaatgcactcatcacagaacgaacaggattcaagacattatgcatttgcagccaaagtacctatgcttgagcctgcagattcagaagaatcaagacttttcgttaaggaagcatatgagatatcagagaaatacaatacaccggtatttatcaaaatgtgtacaagagttgcacattcacagagtgttgtatgtcctgaggaaagagtagagcctgcacaggttccttatgtaaaagacccaactaaggtcatgatgactaagaattcaagagatgcacatgtaagagttgagcagagaacacttgaccttatacagtatgcagagacaagtggaattaacagaattgaagagtgtgcagagggaagccttgtcaatggaaagaagataggtgttatcacatcttcaacatcataccaatatactaaggaggtatttggcgataaagtaagcgtgcttaagcttggaatggtatatccacttccagagaagcttatcaaagattttgcagagggcaaggatgaaatctatgtaatagaggagcttgatcctatcattgagaaccactgcaagcagttaggaatacaggttcatggtaaggacacatttccaatatgtggagagttctcacagaatcttattaagaaatgcatgggaatggaagaaccagaattcacatcaatagatgcacagattccgggaagaccacctgttatgtgtgcaggctgcccacacagaggaatattctacattcttcacaagaaaaagattatggtatatggagatatcggatgctacacattaggcgcagttgcaccgcttaatgcgatggatcttaatgtctgcatgggtgcatcttgctcaggacttcatggtttcaataaggctatgggagaagctggtgagagcaacagcgtaggcgttatcggagattcaacatttatgcattcaggaatgactggaattacagatatatcttacaacatgagtaattcaacagttattattcttgataactcaatcacaggaatgacaggacatcagcagaatcctacaactggtaagaacttaagaggagagccagcaggcaaggttgaccttgaagcattatgcagggctttaggctttaacagagtaagagttgttgacccatacgacctcgcagcagttgagacagcagtgacagaggagcttgctgccaaagaaccgtctataatcataagcagaagaccatgcgtaatgattaagggaactgtacataagcctgcaatagcaattaatcaggatgcctgcaagggctgtaaggcatgtatgcagattggctgtcctgctatatcattcaaggataagaaagcacatattgacccaacattatgtatcggatgtgaagtgtgcaagcagatgtgcagattcgatgcaataggaatgtaagtatagacaggtaactgaagggagattcaatatgacaaagaatattatgatagttggtgttggcggacagggaacacttcttgccagcaagatgttaggatatgtattattaaagcagggatatgatgttaaagtttcagaggtacatggaatgagccagagaggtggttcagttgtaacttatgtaagatacggagagaaggtatattcaccggtaatcgataaaggtgaggctgatgttatcatctcatttgagcagttagaggctgcaagatgggttgaattcttaaagaaggacggagtcatcatcaccaatacacagaagatggagccaatgcctgtaattacaggggcagcagagtatccggaaggacttattgagaagcttacagcagcaggagctaaggtagacgcaaaggatttccttgcactcgctgaggaggctggctcttctaaggctgttaatatagcacttatgggaagattctcaacatacttcccagatatcacagacgagcagtggcaggacgctatagagaagaatgttcctgctaaattcctcgagcttaacaggaaggcatttgaactgggaagaaatgcttaagtaattcacacagggggaagtggcttgactagatttactatatgcgatgatgagccggagcatggcagattaataggtaaatatataaagactgaatatgcaaagcatgtgccagagactgatatagcagaagttgtggtatatcagtctccacaagaaatgcttgatgaagcgatagaagacacagatatattcatacttgatattgagtgtggaaagtcgagtggattagatattgcaaaggagatacgcagattaaataaaaatgcaggaatagtattctgcacatcacatagcaattatgtgtatcaggtatttggtcttactcctattgattttataagaaagaataatattgaagaagatattgtacagacaatgtataatattatggattttctcagagaaaaaaagaaaatacttgtaattgagaaaggcgatataataagactttcagatattgtgtctgtgaatgtaataaaacatgaccttatattcaaaggtgttaatggcgagagaaaaataagagcaaacctaagtacatatgaagagcagctaaagcagttcggtttcattaagatatcacagggcgagatggtcaataaggattatataaaggaaagaaaaagagataaccttattatgaaggatggcacagtctatcacataagcagaagtagagtcgatgagataaggagaatgttcatatgacagatataatattcgaaagtttcataaatctgtttcagagtgtagttgtgacagtgttccttattataagtcttggctgtaaggataagtataataagaaatgtgtcagtgcagccgggatattaattacattcatatatcttactgtatctaatcatcttgtgttcttcgagagcgtgggaatctatgtatatatggcatattcactgatgttcagttttgtgatactgagcggaagtgttattgagaagatattctacaatgtcatgatgatatgttgtctggttggaagtgcactattaggtggtgggttggtatcacttgttgttaagaaagattttcttaatgcacatagatatggtactgctgaaagatatgtaggaattatattggttcaggtaatattatctgttttatttgttttaataataaaattaaaacaaatgttaaaggaaaaagataatcaatacatgcttataatgtctttgataccagctatatcggtaatagtatgctgccttatggtatatcgattagataagagctatgagatgaatgtaatatatacatttattgccatggcgggcattataataattaatgttatcagtatattactgcttattatggaacagaaggtatatgaacagaaaacccgtcagcaggttatgcttagtgcatatcagcagaaggagaaagatattgaatcaatacttgatatgcacagacagaatagtaagcagagacatgattttaagaatgtaatattacttataaaagaactgatacgggatgaacagtataataaagcaacagagatgcttgataaatacagtgaaggttataagaacaataatcttacagagattgtaagtgataacattgtgcttaattatctgctgaacagaaagattaaccaatgccgcgaggctggaattgacatggcatgttatatactggggaatattgcaggtgttgatgatatggacttatacatacttcttgagaatctgtgtgataatgctattgaagcagcaggacaatgtgagaagccatcaattaagctccagatagcagaggataatgccagcatgtatatagacataggtaataccacaagtggtaatgtattaaagaacaatccacacatgaatacaaccaagaaggataagaacatgcatggtttcggaattatgaatatcagagatattattgataaatataatggaactatcaactatgaacagcagggagataattatctgatgtgcagatgcgcattagaaaaggtttgtcaatagctttttgataattaaaattgtgcagaatatgccatatattaccgaatatgccaaactacttttttaaaaaattaaatcagctataatcaatgtataaagtgaaa

SEQ ID NO: 8497 - DNA, 64182 bp, Unknown
  gut microbiota DNA sequence
attttccatttaccaattcctttttcagtagcccatcagctcccgttttacggagttggtccataagaaagaaagaatttccgccggtaaaatatatcacatctgcatcttcaaaaacagactgtatcgttgaataagcctccgttgaaatatcaatttcagttacgattgctcccaactttttgaataattttcgagccgagccgacataaccggtgtagccttcacgcaacgaagctgttggaataaatgcgactttcttattttcaatttcttcctttatcagacttcctacacttgaaaagtgcgaacataaaaatagtttcatcaatattctcctttataaattccgattgagattacacctgttttatgagatttaataactgttatactttgttattaaattcactgtaaacccttgaaaacgctggatttgtcgcaggtgagctttcccttattgtttcccttgtgttatatcgtcccaccagtgtttacgaactctgataagggaaaatacaagggcaaaaaaattatataaaacagtataacacaaaataaaagtgacatggtgaactgattgaaatgcttctgatttttgtaactgatgattaatcgaatgataaggagatttgatacgatgagaacgatatttgcagaatacaatccacacagaaacagcattgatgtatataccagtgctggctatatgctccgcattgattgttgggaagcagaaagaaatttaaagactacacccggatctgactgtgcattgaacgcacttgccattgatgaaccgttggaatatgccaaattgtatcttgatggtacaatgcagttgtgggtggatgcggaagattctcttgaattataattttaaaaaaactgcgataatgaaatggatataaatcaactcattatcgcagtttaaggttatcgtccttatttttacctttgcacttatttcagattaatcaatccaagtcctgccaggcatacaataacgccgaccattttattccatgttattgcttctttgtatccaacatatccaacaatgatgagaattaccccaagtatggatgaagtaacgatctgggctgcactgactttccagccagctttgtatgcatatataaagccgacctcaagccccacgagtacaatgccaagtacaaaagatgtccagtttgctttcttcagttctgtcagaatgtcccggctgtctcccagaatcaaaaacataataaatgctactgctgcaccgaccagtgaagatgtaactcagtccatataatatttcacatccaagagcacaaaaacttcctgttagtatatgatcccttttgatttccataatcagcgccccgtctgttctgatttttcaatccgctgataatatcccctgatgatatcactaagactgatacccgccatagaattttccgcatctttctgcactttatcataaaaagactggagtgcaagctggatattcacgcctataccacattctgggtttgtatgtgtatccagatggagcagtggtttatcaccttccacagctttatatatatcaagcaacgagattgtttccggctctcttgcgagttccggtttcggatgtccggttgtactttttattagttccgcatttcggagtacggacataatctgtcttacacatcctggattcgtatggatgctttctgcaattttgtcacttgaaagaggtaagccttctgataaatagataaaaaccagtatatgaactgcatggcttaatttgactgaatatttcatgattcccctcctgactgttaaaagtattataacagcctattgacaaacaggcaagaagaaagtaatatttagctgtaaattataatataacagcattaaaatggagaatgaacaatgagtatatacgaaaatcttgttatgcagacacagatgaattattcaagatattacggaatgtatatggcaggaaaatcgccttataaaaattcaaacaaggtgattccatataaggagcagatacatatttttgcaaaacagatccagaatgcagaatgtattattgtaggcggtgcttccggtttgtccgcctcaggaggaggcaatttttattacgaagacaacgaatcctatcgaaaatattttaaaccatttgcagataaataccattttaaaggtgcttttgctggcatgcagtacgactttgatactccaaatgaaagatggggatatctgacaacttttttacataccacacagacagcccctgttcgcaaaccctatattgatctggatgcaatattaaatggaaaagattttcatattctgacaacgaatcaggatacacagtttgtgaagctttatcccgaagaaaaggtaagtgaaattcagggcgatcatagatttttccagtgttcaaggcaatgctgtgatgatacatgggacgccgtagaaccggtaaaaaagatgtatgaagcaatgaccgacggaacttttgtcccggacgaactgattccccattgtccgcattgcggtgccgaagcttttccgtgggtaaggggatatgggaatttccttcagggcagaaaatatgaccatgaataccagaaaatgtcgaaatatcttgaaaagaataagaacaaaagacttctttttattgagttaggtgttgggcgtatgacaccaatgtttattcaggaaccgttctggcatctgactggtacattgccagatgcttattatgtcagtgtcaatgataaatacaatcttcttccgaaagaaatcgaagaaaagggaattgtgattgtagatgatattgcaaaagtacttggggatgtcagagctgtcctggaaggaggcttagaatgaatgattactatgaaatagcccaaaagataaaggatgcagatgcaatattgatcggtgcaagtaatggtttatccatcacagaagggctaaacctgtttgcagatgacgaggcatttgaaaatcttttcaaggattataaagaaaagtatggttttcgaaagattttagatggcttctttttcagatggaataaacaggaggaaaaatggggattttttagcagactggtcaatcattacagcggaaattatacaacttcatctgttatggaggatttgaaaacaattgttggagataaaccatatttcatcctcacttctaatggtgagggacattttgaaatgtctggttttgagccacaaagggtatatgagcttgagggaaactggattgagttgcgttgcagcaggctatgtcacgataaaacatatcctgcacttccaatcattcggaaactggcagaagttgaaaaaaacggcttggtttcttcggaatttcttcccaaatgtccggtttgtggtgctgcaatggatttatataacgcacagcctccaaagcaggaagtacaaatggaatgggaaaagttctgcaaagattttcataataagaaaatagtaattctggaacttggtattggctggagaaatcagctaataaaagcacctcttatgcgaatgactgcaaatgagccacatgcaacttatataacaatcaatttgggagaagtgtatattccagataacatcaaagatacgtcttatggtcttgacggataccttagtgaccatctaaataaaataaaacaagcaatggtagccaaatagtaaagaaagtcccggaaagagtgcagtttcctgagttccgggactttgagagtatgagtttaccactacaacagcttaaaagccggatgcaatatggtgaactttaccaccgcaatttctacaaagaagtacaggacaaaaacagagtgtattatgaatattatcatctggacggaaccgaagaaatcccggcagattacaaggaaatctcctttgtctgcttgagaccagacggatgtctggaacttccaagcacactcagcatcgcctgccggtcagttgcgaaacgactggacggatttgagaatttccatttccaccagttgcgacacacctacacaagcaacctcctctcaaacggagctgccccaaaagatgtgcaggaactgttaggacactctgatgtcagtaccacaatgaatgtctacgcccactctacaagaaaggcaaagcggaactccgccagacttcttgataaagtggcaggcaacgactaaataaaaaattcccttatttcccttgctgattccgcataagggcaaaaataagggaaaatacatatcatttcactatttaaggggctggaaagcccgtaaaataaggaaagttcaagaaatctctccacaaattccgattttcttaattctacaaactgctttttatttttgttaacttctcgaattttcatacaacttgttactccatcaattgccatctaatttaattcatcaaattgatatttaccaaatcgtcaaattcaaatttctacaactccttgacgaataaagatgcatcaattaatatgaaatcagggtagttataatattcttatacaaacctttgcagagactccgtgggaagagtctctgtttttttgtgcataggtgtatacaatatacatgatgatacttttaaatcactttcccttttccaactctttgaaaaaagcctttgcattatccaaatcattcttatccggatgtccttttgatatgcctccaataagtttgaatggtccaaatgtgtcaaatcccttacaagaaaattctcccacaattcttccctgcttttcttttacaattttctttatggaatcaaagaccggctttcctccataagtgcatataagaaagacatccttattctctggaagattcacttctgcaaagttaattactgactgatgcagcttgccaaaataaataccagaagcaaaacctataagatcataccctgataagtccttttcagtaatcttagttgcatcaactacatcaatatcattttcagctgctattgcacataccagctcttttgtattattgtgatgaaccgacgcgtatataataactgttttcatatctgcttcactccattatttcttagttcaaaatccaatctcatctggtaccacaggacatttccatgagtagatttatcagttataccctcatcaaacataagccagaaatgattcccaaaatattttattctttgctcaaattcttctttagttgctgcctctaagacaggaaaacatacagattcaaccgatgcaatatcgtctaaatcagccattgttgcatatcttatattcacaatcattccttctttactattgctttttatatttagtttttattcatatattactataatttgcttaaatactctgccggaacagccttcacaagccatactccatttacagataagaaaaactcatatccttcatctgccatctttccggctgccaccctataaaccacaggctttccatgcatgctgcccagccatgttcatcaagtttgattcctattgtttccggtttatgccgcaaaatgagacttaaaaatttgcttgtgtccgttaatcccattgttatccccctttagttttcttttatagcttcctgtaagacatataatgcacattatatgcgtatttctaatactttctactctatcacatactcatacattctaaactgcctgtttccaactacctcataaaaaatgttttcagtacttatgtatttaaaacctgctttgatatataacttgtcagctagtgtgttcttatctattacataaagatgaatggcttcaatgttttctaacttagcatatgatatgatgttttttacaagttgagtagcaagacccataccgcggtactcatatcacactgcaagagcgtggattatccatacattattatctctttcatttactttccacgctacccttttatactctttattagaattactgttaactatggcacacgccttaataattccttcatatacctcaatcaacccactcaatcgcctaaaaatgctattatagtaggctttccaaattatagcagctctctataacccatatttaattctagcacgcgtaagctttccaagcagtccatcaccaaaaagaaatgcacatacagccgctccacccgcatgcattgcatcataaggtgcacctgttatgtacagaagcttcagtgcctcccatgatatattggcactgcctgaatccgtatatgtgctgttcatcatcatggctgcaatattcataattccaccgtatataacaaacacacttataaatgtaaatattgtcactgtgataaaattacacggtatacggcttctcataagaagaactgccataataattccagcaagtccgaaagcatacagcctccacccaaagaatgtctctcccggctttgcagtaaatatatatacaatatatcccacaatctctgacacaaccatacacacaacaggaacagccataactgacagacctgttcttgcctgctttcttacaatctctttcttatcatcaaaatatccgacaagctccggtttgtaaaatgcaattcctgcaagaacaccaagcagcccccacgcagccatttcccacggagtccataccccctgccccataaagaaattacatacaaatcttgacagtacacctgtaagaaatcctgtctgtggtccaaatgcaatccctgttattatgacaagtgctgtacccgcatgaagcggtatcgtatacgcacatattatattagcaacaactgtaagagctgacataactgcaatcatcacaacatgccttgccttcggcttcctcttttcaaatgtaaagaaaggaatggcaattgcaacagccagtataataatgcttataagcatgtaattaacactcattatctattatcctctaaacatctgtgaatcgcttcaacagcttcatcacatgttacacaatctttgaaaaaatcggacataatcctgttagtatctgttgtgaaaaatatattgcctgcaaagaagctgtgtgaatctgtgtaactttctatgtttctgtcaaatattaatccacatttgtcggcaaataatgcacagaattccacatcgtgtgaaactatcacaatagttttccccatattctttaattcttccagccattcacccatctttttacagaagaacgggtcaattcctttagttggctcatcaagcagaataatatccggttcatacagtagaatctttgcaaatgcaagcctctgctgctgccctccactcaaatcatacggatgctgctttctcacccttagaagtcccgtccgctccagcatattaaaggcaagttcaattctctgtttcctgtccatatccttaacagacacattccccttatccatgactgccgatgcaagctcttcctcaacacttatctgactaagcagtgccattggattctgcggaagcaccgcacatcttccattcaccttcaccttaccggatataggctttttaattcctgacataagtcttaaaagcgtcgtctttcctgccccgttgcttccaagcagagcagttatcctgcccttctctatatcaaagctgatattttcaagtacatttgcagaattcttagtgtatctgaaaaacacatttttaactgaaaccgctgtatccccggtttcgtaatgcttatcctgtgatacatatgagcctcctttaatattaagactggctatccatttcctgccctctttaactgtaagcgggcagtctgtttcaaatgtaatatccttcttacacccctcatatatccttacagatgaaggaagcccgtaaacaagcggattctctgtcttaacaagactttctgctgtctttctaggagaaccattatatattagctttccatcctcaagcacaagcactttgtccgctttagaatagatatccgcaagattgtgttcaacacacataattgttattccaaaatccttgttaagctccagaactgtatctaagaacttcttcttagcaagcgggtcaagctgtgccgtcggctcatcaagcaataaaacctctggtctcataaccattatggaagctagattaagaagctgtttctgtccgccagacaattcctctgtattcttatcataccagcccgtaattccgaaatattcagacatttctgcaaccctgcgccttatgtctgcattcggcacgccgagattttcaagcccaaatgccagctcatgccataccttatcagtaacaatctggttgtcaggattctgtccgacatatccaatcttaactgccgcttctgcctgacttaagctgcttatctgtctgccgtaatattctgcttttccactaagtctcccctctggaatcatgcttttatcaagcatcttaagaagcgtagtctttccacttcccgaagcacctataatcagcgcaacctcgcccttctttatatcaaatgttatatcttcaagtaccaatacatcacttcctgcatacccgaaagaaagtgatgaaacattaataattgtgtctgtcattatgcaattacctttcgttatatgaacttcgtctcttatactgcacatctcctgttatctctattatcaatggaattactgtcagtattacaaatgctgtaactgccagcactccttctacacctgatttcgtataatatattacagggagataatatactgcaagcttctttcctgctattggaataacagccatcacaaaacatacaagcattataattatcgtaaaggtatcctttagtgtgaatctgaatctgttaaagcttgtccttcctttaagtccatatcccctgctctccatagacatagaagtttccattgagctttcaagtgaccatgttataagagttgaaaattcattcgcaaaatgtccgattttttcaaagatgccattcttattctccactcctcgaagtcccatctgtgcgtcatgtatttgtctgtatctctttctcataagcggtatcattcttaatatcatagaaaatatcatgccaacagaaggaataaaacttccgaacagatacatcattttctctgaagaaagataactggctgcaacactgcaccattgtatgactgcaattaataaaagacttataactgcgccgtatattatattctcaagacataccatgttatcgttaatataaaacaacggtgtaactccgctgtgattaaaaattggctggattaacacagagaatataacaacaggaattgttatcataatattcttcttaataaaagaaccaccctgcatatatattccaagggcaagtgaacctgcatacgaaaccgccagtattaccgggttcattgtgaacatggttatcaccagcacaagtgcaatgtagatgaaattcgtccacggatgcattgctgcaaatgctgaatatttagttacttgtcgcctaactggcacacgtatatccattttattacatctccatcttttactgtatactgattagccgccatcataggcagaactccattaactctgtaagtccagccactttgtggtcccacattcttctctgacagattattaatgcttgatacatacgacttatcggaattagcaactatcggaattacaggatcatgcattgctgtaactgctgcaagaacatcatatacagtaaagccttcaactgcagtgtatgttgtaacttcaagtatagttccatcatcagggatacgtgatgcaattgacggattaacagtatcttttctcgctgtcgcattatcgcatcttatctctatagtacaactgattaccttgcctgccggtctggtattctgtgaattattccctgaatcatcatttcccgaattgttacttcctgaagtattattccctaaattgctgctttctgaatcattgccacctgatatggcgtttccgttactcctgtctgattctctaccacctgaaccggaattattatctgtaactgttatattatccgttgagtcagaagcagaattgtcatctgaaactgttccatcacccgttccatcaaagctgccgttgactgcagcattggcattatcggtactgatggtttcatcctgtaatctatcattattatctggtctggctggctgcgtctgacccgaatctgccatattactgaattgctttctgtaggaatcaacagaacggattcttacattggttattaaaaatataactaaggcaagacctattaacacaagaccaatattttttatatttctgtatttgttaaacattcatatttctctttaatatttcttattgattttacctcgaaataataacatatacagtcaatctattcaaactttctttacgaattaacattttatggcataaaaaaagcagcttacgctgcgaatgctttaagatagcaacttccatatgagtaccacctttttacatttcatggtcaataaatttacatatccgagaaccacagccatccccgtcttttggctgtcccccttcaatgcatattcataataaccatttcatgtaaaaggtgtaatcatattcatgtatagttcttgtaaaattctaactccagtatcctagttctacgcctttcttgtatacaccaatcccctttgaataatatccataacagttaaaatgtgtccagtcatatcttaattgttcagatatattacctttcttgaaattctcaaggtcatctgttgttgcatcgagtccgcagtcacttaatccattctgaatcatatatgttcttgtattaaaaaaatggtctccatatgcaagtcttaacgctgcttcccatgatgtatcaccgattcccacataattaccatcatctccatactctccctgattagcatctgcagaatcagctggatcatccgtatctcccagtactatataatatttgcatccagaattaagtattatatcatcatattgaagaataagctgtttataattattagaccatccgccattacttcccatttcaagtatcaatatatctttcgcacttctttcctgtgatgcccttgtcattgcctgtgttccgccagagattgtaactttttctacgcctgcagtttctgttggcttctctgttggtttctccattggtttttcaccagatgtttgtgactccgtttcttttgtcactgtgtcatgttctgttactttatcactctctgcttttatatctgcttcctgtcttgaatatgtatcagtttcactttcatatataacaacgctattatcagtagaattgtcatatgccgcatatccctttgtaagttttatacttacgtatccatcttctgcgttatcaacatcacataaataaccatttatatacatatctcccggataaggatcataatcaaatccatatccgctataatcatccgctttaaacacatttccatcttcatctataatacttgctattgctgagtcagtctcacttattgtaatatccctgtcaatatacactttagttccaccagcacgaaaagtaatataactggaatcttctcctgaccccccaagattatgtgttggtatgttagtcattttttctattgtaacaggtgtagtccacccatatatatcaatgccatttacttttccttcagttgtacttcctgctcctgccatcatactatccccatagcatgttatttctctcttctgcccatcatatgggataaattcatctgtaagctgccttggtggaagctcaaatgcttcctcattttctgttgatatctcattttcaaaaaaatcttcaaccacttccttgtctactacttcaacactctcttcctgcgttgtatcctcttctgtggttccctcttctgtagtctcttgcactgtagtttcctgcaccatcattgtatgcacagttgtttcttccacatttttctttttttcattcttattatgtcttaattgcacagcaattatggaaatagttattaatgctataactaagactgacaccacgcttataattagatatttttttctatctttattacctagtcttaacatgtctttcatataattttctgccctttctttagttctatttattattatacgaaatgaagtttaaataagtttaaaaaagaaaaacttccgcgaaattatatcacagaagtttttctttgtctatttttttaatcttgttgcataaaccatgacatcatacatccgccatctgcaccggattcaagcacttttttaatgttatcaggcttaattcctccaatcgcaaacacttttactgtgggattaacagtatgagccgctctacacacttctttaagaaaactaagtcctgcccccatcttccccggcttgcactgtgtctcaaatatcgttccaagcacaatctggtctgctcctgcgcggacagcattcactgcctcttccatactgtgacacgatacactcacacaatcaagcctctttatcacatctgcctgttcttcacacatttgtttaaaatgttccattgaaaaatgtacatttccacagtctgcatactttgccgcactgatatcactgtgaacaaacattttaacagaagctttcctgcacattacctgtatgtgtctggcaagttctctgtagtcctgcctgtccatgtccttttcacgaagtatcatggcatatgggtgcagtgccacacatttttcaatctgcgtaatgtactcattcatagtacactctgcaccaccgctgccactcacaaggtgcttgttcgttatacatatatattttctatacataaatgtattcattcacgactggctgaagcccgccatcctccatatccttatacattctgtcaaatgaacggttatcattgatttcaaactgttcatctccggcatcaccatcttcttttcctgtatatttagattcatggtcgccgattcctgttgaaacacctgctgaaactttagtggcacatatcttggttataccatttctaaactgcgcactctcacggcttgaaactgttattccaacgaatggcagaaataatctgtacgcacaaagcacctgacacaactgcttttcgccgacatctcttggattaatcttatcattgttgattataggacggagtctcggacagctaagactcagttctgcatgtgggtattttctgttaagataatatacatgcagtgctgttgccagtgcgtcttttctgaaatcatcaagtcctaacaatgctgaaaatcctgctcctctcatgcctgccataagcgccctctcctgtgcatcaaatctgtaaggccatactctcttatgtcctaacaaatgtaatgtctcatactttacaggattataagtttcctggaatactgtcacataatcaactccacattcatgaagatagcggtattcatccacatttacaggatatatctctatgccgatattcttgaaatattttcttgcaatcttaactgattcaccaatatactcaacgtctgaatattttctgctctctcctgtcagtatcaggatttcttccattcctgtatctgcaataactttcatctcatgctcaatttcctcgaatgaaagtttctttctatgaatgttattgtagcagttgaatccacagtatatgcagtaattctggcagtaattggctatatatattggcgtgaatatgtatactgtattgccaaaatgtttcttagtttcattctctgcctttcttgccatctgctctaagtaaggcgctgcggctggtgaaagcagcgccttaaaatcctctatattgcaggtatctttgcttaacgctctctcaacatctgcagctgtgtatgaatcatagtcatactcatccattgcctttaagactttatccttaatatccgaatctataatttccatgtcatcaagatatttcatgtaatctgttctgaatgatggatcctgctctaacttatgttttctctctaacgcagccggtggaagctggtcactgtctataaaatacacctgattttcttcgttcattattctgccttcttttctattatattctcatatttcgtcaagcaatacttccccgaagttatgcttccgctgaaattatcccgccagtatctcttgcaattcacctttgggattgctctccacatttaacgtaagaatcctgtcaatgggtcagatgcacttccacctcttgcaagaactcttcccattcctgtaagatatgcgcttcttcctgcctctatagccttcttaaacgcctctgccattgccggaacatttcctgcggtcgcaatcgctgtattagccataaccgcagcagctcccatctccattgcctcacatgcctgcgaaggcttgccaattcctgcatccacgataattggcagatcaatctcatcaataagtatctgtataaatgctttggttgaaagtccgttattgcttccaatcggtgaggcaagcggcataacgcaggcagctccggcattctgtaaatctcttgccacattcagatcaggatacatgtatggcattacaacaaatccttccttagcaagtatttctgttgctttcactgtctcatagttatctgggagaagatactttgcatcatgcataatctcaatctttacaaaatctccacatcccatctcacggctgagtctcgcaattctcactgcctcctctgcatttcttgctcctgatgtattaggaagaagcgtaactcccttcggtatgaaatcaagaatattctccttattctctgtatttgcacgtctgagtgcaagtgtgataatctcagcaccaccctgctcaactgccgccttgataagattcacattgtactttcctgaacctaatatgaatctgctgttaaactcatgtccacctaatatcagcttatcttctttcttattcatgtcttcttttctggtcatgtcttccatcttgttttccattgttttgatatcctcctgttgtctgtgattatgtttctggtggcaattcttttgctggttatacttccttaccgcaataattatctgtcccaccagtcatttatttcctcaatctggtaattgatgactgaatttgttctcttactgttagaaaacctataaaaaatgtattttctgtcttttagtaggttcacgtcagctctcttattttcagaaaacctactaatcaagctcttataaagcatcttataggtctttctttactctcatgttttaatatgacctataaataccctgtttatctcgcttttataggctgtcagctatcacaaaaacctactaaatattgatttccttataccttataggtttcttaatatttccctaccaaaaattaacctactcaaattaaaattctgtgattttagtaggtctttgcctattattaaccgctctgacataacttataagcaaccagacttcctgaactcagactaaaatcatattaaaactgtccgccaccaacaaaatgcaatatctcaatcacatctccatcatcaatattaaccttgtcaaaatcttctctgtgaattatttccatattcttctcaattacaatacctaccgggtcatacccagcttctgttacataagcaagaagtgtctttcctgcgactagtgcaacatcctgttgttctccattaatctgtaccattgtgcctcctttccttctctccgcctttttgcgcgagcagctcacactccagaacttcgttctgtcgttgtcgcggtgctcctcgagagcccatataaatttcacagttcgtgcaagcacgactgtgaaatttccatgtcttctctcctcgttactcgagctttttgtaagccaagtctctccgtagcttcgctactcgcgagccttgataattcacaactcccggtctccgaccttcgttgttcattattgacattcgccatataagctgaaatctgtgcaagcacatttcagcttgcatggctcattgcttacaaaaaagaggcagagccgctttccagctggctctgcctctaaaattcacaatatgaacacgccggaaatctattattaccgacgcctgttgtatgttcgcctgtatgaattctgtaaactgattatcatcaactctctttgcttcatacctactggtcttgaaaagtggtgtccccaattcaacgccttgattaatataacatatcactgataattattcaactaccagctctgtatattgatgtctgtaagttttacttctttatattcctgccctatgtatgcatatatctgttgtaattcgtcatcgtcaaattctgcggcttcaccattatacatgatattaattgtgtagctgtcctctccattattctctgcccttatgtagaattctgccggaccaaacataacttcaagctctctttcagcctccgcacacagactggcaacataattatcatcaacctctatatcttcatgttcatcataattaaatgccatctctggattatatccttttctggctgctttctcgctctctaaaggagtagtcacttcattttcagaacccgatgtacctctttcaataggaacagctttagccgtaacaggttcagattcatctgacattctatcatccacacctgtctgcttatcgttcctgacagaacatgcactaagaaccagagccatcgtgcagacacataacacacataaaacaaaatgcatagaatataagcatacacgcttcataacatcacctctgcttatattctatgccaatttgacaataaatcaatattaattttcattcctccaggcctcaacaacccctccgataaagccgggaataagtccaaaatatccaacgaatgtaaacatacattccatccccctgaatgtaaatatgcttacaactgcccatacaacaaagccgattgcacaccatgcaagggtgttaagaagaagaaacagatattcatatttcttttcagtcaaattagtatttttacaaatgttcagaagcattttcatcaaaacctcccttcgtatcaagagcaaatattacccattctgcaatgttagttgcatggtctcctattctctcaaaatacttggcaaccataagaagatctgcagcctgctcaccattggctgaatctgcctgtatcattgctataaggtcatctcttaccttttcaaaaagatcatctactacatcatcatacgcgataacttttctcgctttatccatgtctttctcaacatatgcttcaatacttctgattaacataagcattgtctcagaagccatctgattgatatgctctaatttctttatgtatgactggttagaaagcttaatagttatctcacctatatctgctgcctggtcaccgattctttccatatcagtaaccatctttaaggctgctgttatagttcttaaatcctttgcaaccggctgctgctggataagaagattaaagcagatgttctcaatagtcttctgctccctgtcaatctcctcgtcctgaatcatgacctttttagcaagctctgcatcctgtcttacaagggcatcaacagcctttcttattgaatcctcgattgcagaacccatcttcatcatttctttgttaagtctgtcaagctgttcgtcaaatttacttctcatcatccaaaccttcctgtgatataatcctctgttctcttatcctgaggataagagaatatctgtttagtatctccaaactccaccatctctcctacaaggaaaaatgctgtctgatccgaaactctcgttgcctgctgcatgttatgcgttaccacgattactgtatatttcttctttaagtcttccatcagttcttcaatcttggctgtagatatagggtcaagtgctgatgtaggctcgtccataagaagcacctctggctggactgcaagtgctcttgcgatacagattctttgctgctgtccacctgaaagtcccatggccgattttttcaatctatccttaacctcatcaaatatagctgcaccacgaagactctcctcaactatctggtcaagtcttttcttatctcttattccgtgaactcttggaccataagcaatgttatcgtatatgctcatcgggaaaggattaggctgctggaataccatacctacctttttacggagaatagtggtatcaactcccggctcatatatatcctctccatcaagaagcaccttgccatctattcttacaccgtcaaccaagtcgttcatacggtttaaggtctttaaaaatgttgatttaccgcagccagatggtccgataaatgctgttactgcattttcctgtatatccatgctcacatccttaagggcgtgattctcaccataatacaggttcagattttcaactttaactttaatcttattgctcatatattcctcccaaattagtgcttttcaagcttcttagcgagcctctttgtaccaaaattaataagaagtacaattacaagaagtacaaccgctataccgaatgccacctcaaattcacccttgcttgcgcttaaataaagctgaattgtaagtgttccgcccgagtgaaatattttctcaagaaatgcattgaaggtctttggaagaagatgtgcacttcccgctgtaaaaagcaatgctgctgattcaccaataattcttcctattgcaaggattactccggttacaattccaggcattgctgacggaagaagaattgttctgattgtgtaccatttacctgcacctaaacctaccgctcctgttctgaagctgtcaggcacagtctttaacgcttcctgtgtatttcttgtaacaagcggaagcaccattaatgtaagtgtaagagaacctgtcagaagtgaatatcccatgtgacataactgtccgaagaaaagcataccaaacaggccaaatataattgatggaattcctgcaagtgtctctgttgcaaatattataactgtaacaagctttcccggtttggcgtactcatttaaataaatcgcagcacctacaccgattggcgttgtaattatcatagtaagtaatattattatcaatgtgttcagaatattaccggcaattcccacagttccgtgaagaattgatgtaacacctgtaagaaatgcccagtttacacgccttgcgccctttgcgaacacatatataataattcccaaaagcaggagaactgaaaatgctgcacatacatatattgctgtataaactgctatttcttccggatgtcttttcttggctttaagattatccatttgctttctcccctttcttctgcataaatgtaattatcaggttaataatcattatgaaaatgtaaagaacaagtcctactgtgaaaagaacctgtctgtgtactccatctgcgtaactcatctcacttacaatctgtgttgtaagaaatcttactgagttaaatggaagcggaagatttactgaaccaccggctaccagattaatagccattgcctcacctaaggctcttcctatacctaatacgatacctgttataattcctgatttggctgctggaactacaaccttgaatattgtctgtatcttagttgctccaagagcaagtgatgttgctcttaaattcattggaactgccctgattgctgacgcgctcatattgataactgttggaagtatcataattgcaagcaccagcactgcagccaggaggttggctcctcctgtgtactgatgtgttgtggaattcgcgaatacatgcttttctaatttataaaggagggggtttaatagcattaatccgagaagtccgtatataacagaaggaattgctgctaacagttcaactgccggctgaactactgctgcaagtttttttcctgctatctctgtcaaaaaaactgctgttaataatccaattggaacaccgagaagaatcgcaagtgttgttcctgcaattgatgaaagaattatgtatacaattccatatgcaggcggtgtagcagttggcgcccatactgttttaaagagcaagtctgctattccgacgcttttaagactctctgttccttttataaacatatagatggtaatggagcagactgccaggatagctactaccgcacatataaggaatataaaccgtgctacactttcacttgcatgctttgactttttattaccttttaacgaaccatttgccgttgccttaacagcttctggtgttttatttattctgttcataccaacatttataacctcatccatgtcaatctctccattcagaatctatattaaccgcggcttactctgggaggattaagcctacacccttgataaccttcttgcctgcgtcagactttacgaagttgaaccatgtctgaacaagctcactctgtgatgaaacagaacccttagtagccattacaaatggtcttgaaagtgtatacttaccagccttaatgttatcctctgttgcatctacaccatcaagctttaaagctgcaactgtcttatcaactacatctaatgaaacatatccgattgcacctggagttgctgcaaccttggcaagtacagcacctgtactgtcaagttcctgtgcatatgcacatttattcttaacttcaagaagttcctcaaatgctcctcttgtaccagaagctgcctctctgccgattactacgatagcttcgtctgaaccgccaaggtccttccagttagtaatctttcctgtgtagatatctgtaagctgctgctttgttacattagtaaccttgttgttcttatcagtaatcattgcgataccatcaattgctacgatgttctcctcaatacctgctgacttttccttatctgataaagctcttgaagcgttaccaatatcaacagctccggatgttactgactcaatacctgcacctgaacctgtatattctgttgttactgttacattaggatattcttccataaatgcttccatgagagcgccacacatcttttccattgatgtacttcctgctaactgaatcttgcctgaaagctccttagttgtgcctccgtttgctgatccatctccatttgatgatgtacctgttccacagcctgctaatactgcaaggcctaatgttgctgttaatgcaactgtaagtaactttttaattccttttctcataacttccgttaccttcctctttttttatttgcaagcattaacagaagattttcgtaggggcttgaatcagtttcctgaccgaatgatatgtgaatcgtctcaaaaaaagaaaaccctctgcatctgcttgcagagggtatgttatcaatgttatgtaaaatgcataatctcacgttcgtaaagattttgtaaaatgtatgtgattatcttaaagtctttctgaatattattataaaatatgccgttcctataatagatgtaaatgcccacgcactcgcatacacaagatagagtgacatcagtgtatgtatacttgcaaatattgtacacacccatatgattctgaatacaacagaacccattataactattattgtaggtataacgcttctgccaagtcctcttgctcccgctgccgcattatccataaatgcggatataaaataagagcatcccattattccaagtcttattgagccataatgcaatacatccggatcacttgtgaacaggctaagaaactgtgtcctgaaaactacaagcaatgcaccaagcactgctcctataagaaatgaatacatctgtgtaacaagatatgctttcttaatcctgtcacgctttcttgctcccagattctgcgctataaagcttgtacatgcagtatagaatgccgccatcatatcatacacaatattatcagcattagccgcagccgaattgccctcaacaactacatggtcaaatgaattgactgctgactgtatatagagattggcaactgcaaaaagtgaatactgtactgctgcaggcaaaccaatctttaacactctcgctgctatatgtgaatctattcctatatttctcatataaagcccataatccttgccacagccaaacaggaatttaagtatcagaaatgctgatatatactgtgatattatacttgccagtgcaacaccgacaaccccaagcttacacactattacaaagaacagattaagtattacattaattatccccgctgtaataagatacataagcggtcttttagtatctccaactgcacttaacacggcattaccatagttatacattgcaagagccggtgaaccaagaagatatattgtaagatatataactgcgccatctatcagttctttcttagttcctataagattcagcaccggtcttgaaaggaacagtccagacaaaagcagcagcagtcccgcaatcatacatattacaattgaagtgtggactgctttctttacatttgcactattcttagcccccacaaacagcgcgactacagcgttgacaccacctgctagtcctagcaggatgccggttgtcaatgtaataattatactcgttgaacctaccgcaccaagtgccagtggtcctacaaatttaccaactaccgccacatcgcacaggttgaacataacctgaagcacatttgacagcataagcggcactgaatacattaatattttcttcggcagagaacctgtcgtcatatctatttcatttgatttcataaccttatcttaaaccctttaaatattccttctgttccggcgtaatacgataactctctacagccttctggattgactttctgtgtacccattcagaaagcctgcgctcctgtatgtaaggaatcgccgcatcccactgctttgcaagcgccgtcgccatataccacgcaatcatcatatttacatagtactcctctgacttaacacctgcaacaagctgtatatattcttccttaaaatcctcgtcaaggaacaggcgcatcataacgcccattccgtatcttttaacatatgtggtatctgttgcaatccagttcttcgcccgctcaagaacatcttctttattcttatcaaaacattttggaagcggtgaatcacaggttgcccagttatcaatatgtggcagaaacttctcggtttcactaatacatttattataatccttaatctgtgcaatcagcatcatatgaagattattttcttcataatacttatgtggcagctccgtcataaactgttccgcctcctccgtcttagagaatttctttgcaaatgctcttaaaaccggagttcttactcctataacagcctctttatctacccccggcataaggctgctgtgaaaattcctgtacaccgtatcctgtaacttaaacagttcttcctgtaaatgtgtcattattcccctcctgtgtgagctggctcatcgccgcgggttgcgcgagcagctcatactcctgaaattcgttctgtcgttgtcgcggtgctcatcgtaaagccatacaaagttcccagtccgtgcaagcacggctgccagctttttccgtctattctcatcgctaccagtgtgccgttccggcacacgaaaaaagtggaagcatcaactgcctccactttagatagtagcgagagagggatttgaacccacgacaccacgggtatgaaccgtgtgctctagccaactgagctatctcgccataatatttactgaatgtcttaaaaagaaatggggcctacagggctcgaacctgtgaccctctgcttgtaaggcagatgctctcccagctgagctaagaccccacattcagaacaattcacttgatttctctcgcaaactgctctgctattataatattaaaacttgatatatgtcaagcacttttttaacttttttcaaaagttttttcaaactttttcttagccattaaatctgagatgagttttccagactgctacaggcattcactacaagaaaaacctactcaaacctatcaaacgtataatttcgtaggtcatttaacctgcatgggcactgttattccagcccgatgacctactcaatcgctaatatagctcttttgagtaggttttttgcccacctttattttataataccgcatcatttgcagtaaaaagacctactaaaatcactcttttttattaattagtgggcttttcatctgcttgcaatcaaaaacttcattataaaaacctactcaagttacaattaataccactttcgtaggtcttccccacagagactgacaatcacagcagactgacagccacatcggcctgccaacctcatcagcccgacggccacatcagcctatcaacctcatcaacccaacagccacatcagactgacagcctcatcagactgctgcacccgccaacctgacgccctgctcatgccaggtaatttacaaatccagaatatatccggtctagaacagatacctcgtccacaacaggaaattcttaatcagcttcattctgcgttctctcttaggcgtaagcgctacaggctgcacattatatggattatcgtatgtgccatcagcattagcctttcttgcactatgctcatacatctgcatggcaccgccaagctgttcattaatctccttgctgtcaataacaagcataagctctgtatcaagatacacgcttctcatatcaatattaaatgagccaaccaccgatatatcatcatctataagaaccgactttccgtggtatgaatatccgccttcatattcccacacttcaagccctgtgccaagcaccttatccttatgcgcataataatctgctgatccaaatggattgccattattgcctactgaattagtcattagtgacacattttcaacagaatcgcataccttctttaatccgtcatacatatactcattgcagataatataaggcgtatgtatcttaacctgcgaatccgcctgctccatgagcttagtaagctgataccacactaccggttttttcgcgccacattctatcggattgctaagaagtgctatattgctgacttcaactgtttcatctgtataatcagtgtcagtcaggtaatctttgttatctgcataataaatgttgtaattatcaagcagttctttccttgccgccttgacctttttattacctgcacatttgttattctttaaaaatgccttgctctccttatagttccagacactctcataataagcaagaacatcattcacagagctggtttcatcaggactttcgcagtacacaagcacatctctgtcgtaattcttatgtcccggatatgctcccagaaaatagttaaatgtatttcttccaccaagtatataattagtcctgtcggctatgacatatttgtcatgaagccttcccattgactgccacggcttaaaaggattgaccttattatatatcttcacattcacattgtctgatgacgcaagtgccttaaaatcaggattgcccttcatcttggtaaaaccggataccccgtcaactataacattgaccgatacacctctgtctgcagcatcaataagtgctccaagcatcagctttccgctgtcatctgacctgaagtcaaatgtagagagaataacttcttccttcgcgttgcttatcattcttattctctccttaagtgcctcatcattatcctcgataatgcgtgcacgctcggcacttgttctctctttccatatgccctgttcatcaagctgtttaatctcatcagcagtaagctctggctgcttgtggtaacttatcagggcgcatgctacgattgcggcaataagcaccacaagcagtatcaatgtcacaaaaattattctcttcataagttttctcctattgtaagacttcacgacaatactccttaaatatccatctcttctctcatcgctgcccgcgcaaaagaggcgtgctatatatacataattatatatacagcacgcctcttatgacattaaatatttatgaagaattataaattatctgatatagttagtcttaatcttattctcgccctgtggaaactcaattccagccttctttgctgcgtctattgacttaacaagccatgcaaaattctgacctaaaagtctcattgtctgcataccttcttcgtccttaacaacctcatcaggtgtattgccatgtacaatattccagtagttagatgatacaaccggcatctggttaatctggaaatacttattcaacacatcaactgttgatgttgttccgccacggcgggcagatgcgattgaagaaccacatttgtaacgaagctcattgccatatgcaccaaataatctgtcgaggaacatcattatctctcctgttggagaagcatagtaaacaggtgaaccaactataagtccgtctgcatcagttatcttagcgccaacttccttgacaactgcgtcaagctcgccctttacaactctgcttccaactgcaactatctcagtctcaattccctgtgcctctaattccttagcaacaacagaaagcgctgtatatgtacagcccgcatctcttctgctgccattaactaatacaaccttcatgttataacacctccaaattattaattaaacattaatctctgccttcatgccaagctcttccttattagaatcaagaataggcttgataacattagcaagatactcgtcaacctgttccttagaacggccaacatacttcataggatcaagctttgactgtaactcttcaagagtaacaccgaacattggctctgctgcaataagttcaagaaggttattatcaagaccttcctgcttaactctctttcctgctatcatagaaagctctctgattttctcatgaagctcctgtctgtctccgcctgccttaacagcatccatcataatgttctctgttgccatgaatggaagctctgccatcatatgcttgataataaccttgtcatatacaacaagtccgtcaacaacattcaagtagaggtcaaggattccgtcaacagcgagaaatccctctggaactgacattctcttattagctgaatcatcaagtgttctctcaaaccactgtgtagatgaaacaatagctgggttaagtgcgtcactgataacgaaatcagcaagtgacgccatacgttcgcttctcataggattacgcttgtaagccatagctgatgaaccaatctgtgatttttcaaatggttcttcaacttccttaaggtgctgtaataatctgatatcattagagaacttatgtgcgctcgcagcaattcctgcaagtacattaagcactcttgtatcaacttttcttgaatatgtctgtcctgaaactggaacacatgcgtcaaatcccatcttttctgcaatctttccgtcaatctggcgtatcttatcctgatctccattgaaaagttcaaggaaagaagcctgtgtacctgttgtacccttacagcctaaaagcttcattgtagaaagtacatagtcaagatcttctaggtccataactaattcattgagccataatgtagctctcttaccaactgtagttggctgtgctggctgaaaatgtgtgaaagccagtgtaggctgtgccttatatttatctgcgaacttagaaagctcgtcaataacattaacaagcttcttacgaacaagctttaagccttctgtcataatgataatatcagtattatcaccaacatagcatgaagttgctccaagatgtatgatacctttagccttagggcactgaagtccgtaagcatatacatgtgacataacatcatgtcttacttctttctctcgtctcttggcatcctcatagttaatatcatccttgtgagccttcagctcatcaatctgctcctgtgtaataggaagtccaagttcatgctctgtctctgctaatgcaatccagagtcttctccatgtcttaaacttcatgtcaggagagaaaatgtactgcatttccttgcttgcgtatctttctgcaagtggtgtctgatatctgtcgttcatctcgtatccgcctttcatatatcaattctaagtatgccatcatccagaccgcatacaagttaagtatatcatagcaggcttgtgtttgcaattctaccacacttttccatctgctgaatttccgtctgctgattattcacttaatttaaatatgtttaccgaattaccattttcaattgtttctagtttgtagtagtctgtatgacttgtcccatctttataagatatctctgcctcaactaaaacagaattcagcacttcattttttgcctgtctttcagattctggcgactgcttgttcatataccatgaatcatttgttgatttcagttcaagacaaagaatcattttcagttgttcctgttcacctgctgttatgtcagccttatccatcttcagcttctttttattctggtattcatttgacaaatcatcttctattcccagccgcaccctggcattgtatgttttgtatacaattttttctacatcatcatcattataaagtacaggccatttaaaactgctgataattatatatgatgtatctttatctctaacatctgtctcactctgctttccatttatggagcagactgcagcctgttccatatcggcacagtcgtgttccattaacggatatataatcgtctgctttgctcctgtttcttctctgtatttcacgccatcttcttcatagtcttttacattagccgcattgtactctgatgtaacaactgatgtattttctctattcttaccacatgccactgccgttaagctgcagcacaccagcaggcctgcaattatcattttattaaaatgcatacatatccccctctttcatataataataaacagcactattgtattaagcactatcagcagcggaacctccctgttagaattctttttaaatatatatcttgatacagccatagtttctatcgataccagtaaagaatataagatatataccccaagctgcataatcatatactgttttatcgttatgtatctcagcattttcccaactttcataaaagacagacttataagcggtgcatctatatatggcattccatatgtatgagacataactgacatttctgttatattcacaattacagctataattgctgctattatacataccgcacctgatttgactgcctttccccatattcttccccttgctgatgagccaagcagcatgttcattccgcttttatactctaaagcattttcagattcagcaataagcactattccaaagccaagtattatgtatataataagctttcttatcttcgcattatctcctaatatctgattgtatcctctctgtgacataacgtatgcttctattccgtactgtgcatttacttcttccacataattaatctgttccatatattcgttcatgctgtcaagaagtcttgttgagtccatataattatatacatatttacttacagtattttcatctatctcacctttttcaaattgttcctgcgcttcttcaagtttttccgcagcttctttaacttctgctttccttaattctataatttctgtaaatccgctgtaatcttttcctccatattcctgataatattcatcttttttcttttcatcatctgaataaattactttctggctattacatataaatattgtgataaacactaccactgcaattacgagccagccttttcctgttatcagcagcttatatatttccttacacaaatgtggaagctgtcccagaagtttctgtatgccatgtctgattttttcaataatcttatctattacacctgtctttttacccggtctgatatacttccccattattataagaatgctcatcataagcactgatattaccagacatacaacacacagcatagctgccatgcctgctgatatattaccatatactatattctcatagtctttaagcatggcattgacatccattatatttattatattaatctttctgaatattctgaatctgctctgcaaagatatattctgatatgcataagcctctattccggcaataatccccactataaccacagaacttattctttttctgcacagtgcaaatatcacagatacaataagcgataatgtaataattatcattgaattaataaaatatcttataaacagataagtaatcacactgaccgggagtgtataactgctatatcctgtaagacactgaaccggctctgttaatattttatttcctccatatatgcacagcattccacccgctgcacatatattcataataaacatttgtacagcaattataataaacatcgcagccactgaacatgccgaaaaccgcatgcgtccattctttgccgtatatgtaagctgccacatcccattatctctgtactcgtatatgttatagataacatatatcatcaacgctaacatgacatatatagatatatcatgctgaagatattgctctattgccctgctgctgactttcgtaacattaacatccttaattcttgaataatctctttctgttttatctatattagccaccgagtccgttgttccaaacacgctgaactttttcatattctgtgcattagaaataaccgcatttacattgtcacgatatccctctatatattccgttctgatatcatattcttttgcaagtcttttatatatccttctttcatctgaagacaggctgtccagatgctgttttctttcatcatctgtatgtcctgcctccagccagtgatactctcttactttcacattataattatctattccgcaatctgagaagtctcttgcaacaacagccgcaacacatataaatgccgcggctatcataatcataattgtttttttattaagcagcctccccagttccttcatctacctaaactccttaatatccccattagcaatgtcacttttatcaatatatattattgcgtctttttttaatgaaaacataaacattctggtcttgtcaccatgcattatcgcaaatattttctcatcatcatcaagtactctcctggcaatcagctccccatccttactcaattgatatatcgtataattaagagtctggctctgcttattaaagtattttgccgcatctttatatattgtatcatctaaccatatatattcaccatcatatgtaagagtaaaacactgacttccttcagggtcttcaaatatctttacgctctcacaactatctgtattatacatatatattcctgtatcatcaagcctgctgtaatatagattatgcatcttagaatctatacaatatccatatatgttatccgtaattacacatttaacatcattgtcctgaatctgatataatccgtcacttgatatcgaatacaaatcattatcatcctttgatacattcatctttataaaataagtatttccaccatatgtgttcaatgattttattcccagcccatacgatgtttcgctgtatatcctttttgattccttcgtctggatattaaaagcatatatctctacttttatatccccattaattccttcctcattctccttgctgatatatgctgtatccccattaaaacttacatttattgtatctgaactgcctgaattgcatacatttcctaatacaatccgttctgaaccatcagcactgatctgctctaaatccccattcatcctaatcatatatatgaaagaattgtagtaatatattttgggcttatattctgacatatccagatatgccatacattccttagaattatgttcgcactgtggtttgttgcatagaactatgcttttctgttcctcattatcataatattttaacagattaacccctgccatttcctgctctgacatgtaataatatcccgttggacattttgttacttcatgcattccattagtaaaatacgactgcgtctgctccaaatcattttccccagatatgtctcctttaaattccggtttattatgctgcccacaggcagctaataaaacagtagttaataccatccctataaataaattaatttttctcatattccccactaactcaggtatagattgtatattccaacaatctatacctgacaattttaatatgtagccataagtcctgcttttaccacgtcatcatcattactatttgcgccaaatgttgcctttattttttcaaaatatgtatattctgacgaaacatatgcataaacactatatgactgtgatgctgaatttcccaaattcattggttctggttctcttcctatgagatgtttatatgctgttcctgtcacatacaggtctgagcatgtgttaacagacgctcctgccgatgccctatggtcagtagctgttacactatattccattgtaagccctcctgatgtaatactatctctttctgttcctgctgatactaccatacaacttccagctatcaacacagtagttatcataggtattactattctttttatttttttaatcataaagcaatctccttttcacattcaattaaacttttaatacaaatgctatttcaactaatatttcatcatattcttgcttgataaattacacatggcacctgcattacagccgtaattattattcctaaaaacatacaaatagtaacaatttcttttccaactatatctgctattattgcaaccacaacatagattgctaattgccgcatgactatctttctatatgtatgtttttcattttcttctatgattctgttatctgactgaatcggagaaaatatgcataatcccacaaccgaaatagcagttaccatgtataacaataggccactattaatcttagtcgaaatccataaaaacactgtaactaatattgatgaacccacaaaacatgtacatgcatgcttggcatggaatcccccactgaattttctcaagaataaaaaaggtataaccatcagcactccattaattggaatacccataatgcagcctattgctatagaaataaatgctggcgataaaagcaaaactatactataaagtgcatactcatataattcacgctcatcatctttaatagctttgctttttatcagccaattaataattaactttctacctgacgccattactttgtcttcttaaatctttctaattctttaggcgctttaggttcatatgcaaatacacatgatgcagaattagcttccagttttaaaaccgtatccaatacctttactatcttttctgccttgttctttttcaaaatatacctcctatgtttcaaactaataaaacgacgctttatataagcctttaataccacatctattttattaattcaatatcaattgcgtgaaatgacacttttcatgtttaaaataacatttattttaatattctcatcagttataataacaatagcttaattttatggagattggataatgaatatatttatatgtgatgatgacaatttggtatgcgagcagattaaaactctgtgcgaaagttattatattgaacataaactgaaaagacctgatatttacatatttcactctggtgaagacattctggcttcagatatcaaacccgatattgtatatttagatatccagatgtccggcatagatggcattgccgttggtaattcgcttgttaaatcttatccggcagcaataataattattataacttcgtttccggaatatcttgacgaagccatgcgctttcatgtattccgttatatttcaaagcctgttgaaagtaaacgttttatgcgtaaccttgaagacgccatatctgaattcaattctattggcggcaggattattgtaaaatgtaaaggcacaacatatatattatcagcaaaggatatcattatggtgggggttaatcctcaccgccgcaatcttactatttacacggtttcagatacatatacaaccactcagactcttgccagcattaaatcaatgcttccgtctgggagcttttatcagagccatcgatgttatatagtaaatatgaattatattatgtcttataataacagcagaatatatatgaaaaatcatctttacgctgatattgccttgcgcaagtataatgatttttttaatacctattcggcatttcttacaacattgcgctagtttattaatcagagggggattcatgaatttaatattgtactatttatttgtatatcttatagaagccattattctatggctatactgcaaccggatatttacttcacgaaagaacacatttttatctcttttaatcactattggcatgttcagtctgcttatacctgtagcaattctcactaatgcggcactcaatgcattttgctcattcattgtctatctgtgctgcatcgtgcttaattatgattcaaaaccggtttgggcactgtttcatgcccttgccctgacaattcttatggcattatcagaaggacttattgccgcagctattcctgacataacgatatatgcattccgtgatggaaacatacatagttcggcatttacatttgttatattaagcaaatctgtctatttatgtatttcacagttagtaaccagaattttctctaaagatacagtcaataatgcttctatacgcaaaagcacccttatgctgtatctgatacctgttatatcctctatcattaccgtttctcttggctatatatgtctcaacggtaaattgtctggctctgactctgttattgtattcatatgtctggttctgctgctctcaatcaatatcctgactttctatctgcagcaggatatcagccaaaaaaatgttgaatatgccagattgcagattgaattacagaaagagactgacactgaacattattataattatgttcaggaagttaatgagaaacagcacattcttattcacgatattaagaaccaccttaatactatcagccagctgaatgatggaaaacatattgacgaaataaccggatatatcaataacattctgggaagtgatgcactaagaaaatccaaaagatattgcaaaattgatatactgaatgtaattatctcaagatatgccgaacaatgtagtaattcagatataagctttgaggcagacatccgcgccaacacccttgaatatcttcccgcacaggatttcacttccatattctgcaatcttcttgataacgccattgatgcatccctatcatgtgatgaaccatatatagattgtaatgtttctcttatcagaggcggcaacgctgaccttataagcattgctaactcatgcaaatcatctcctttaggccatgacggaaaacttcattccagaaagcaggacactggttttcacggatatggtcttaaaagcgtaaaacgtattgcagataaatataatggtctgctcaattatgtttactcggaggaaaagcatgaattccgcgttgtggttatgctggagcatccttagaaaagctttccagctgccataaactgcggtatattttcatgaatgattccatttcttttttgtatcatatcatttcttgtaagcacatatttaggatagttatctttaatcatctctaatggagcatactctcgatcctctgtttctctgtttaacattgttgtcatcgtcacctgaacataaccatagttgttcatattatctctcataatgaaatcacattctaactttcctattcttccaatactgatatcatacccctttgattttgcatagttaaaaacaacattttcaagggctggtccataattaattctgttatcagtatttgttgcaaaatagaaacccatatctgataaataatacttctgctcaccatttatagattttttggattttaaatcaaaccttttacattcatatattatttttgcatccattaatatattaatataacggttcaaagtttctctctttatgttcattccagatttatgaagttctttcaagatactcttcaaactagttgttgagccaaagttgttaataagatatgtctgcactttttcaaaaactgaaacattacgtatctttaccctgtgcttaatatccttttctaatatttctcctataacactcttaatatatgttctcttatcgtctggattatcataaaaaattgttttagggaatcctccttcaataagatatctgtctaattcatctgtcagattataactcacttctttgccataaaatttcttcatgtctatatattcttcaaacgaaagcggcatcatttcaaattctatataccttcctgtaagctttgttattagttcaccacttaaaagatatgaattagaacccgtaataaaaattgaataatctccttctcctcgaaaagcattaattacctcttcaaagcctttaacattttgaatctcatctataaacaaatactttaatccgtgtatatcagcatactcatctattttgctttctaactgttttggagtttttatatctttatattgtcttgaatcgaggtctattcttataagattcccctctggaattcccaactcttttaattcttcaataattgtctgcattaacgatgattttccgcatcttctgacacctgtcaatacttttatcatatcagcatcatgatagaatcccctgatttttttcagataattctctcttttatataacttcataaagcgcccccatttcttgcattttctatctttattatagcaaaagaaatgtttttttcaagttaagggggtatttttttatttttttgtaaattttacccccttaactcgaatttttactattttaatcctctttaatattcccttttttcacattaggcattataagtttctcatatgaatatttccagagttcttctgagccttctcctgttcgtgcatttctttttaatatctggctaagatgcacacccttttctgcccagctttttccttttgaagcatcatttaaaattacaggctggaaattatccatagttcttgcaaactttgcctctggtgtttcctgtgcctcgaattcctcccacaattcacgcatgtattttccctgatcctctggtaaaatactgaatattctgtcagcacattttaactcacgctcacgctgggttttcttggcttcttcatcataagcatatgtatcccctgcgtctatctcaacaaggtcatgtataagaagcatcgtcattgtgcggagcacatctatcttttcattggcatattctgacagaagcaccgtcattatcgccatatgccatgcatgctctgcgtcatcttcctttcttgacgcatccgccagatatgtctgtctgccaatgctcttttccttatcaatctctcttataaactctatctgtctttccagtctgtctttatccatgttaacctctgttcctgcgctgcttttcagcgcatcttaagtttctgctaatccgtcaattccagtgacgcaacctcgccaacaactataatagctggtgatgggaagtctacttctttcacctttgctgcaatatccgaaagtgttccgacaaactttacatatgtaccatctgtattctcaccgtgaattaccgcaaccggcgtatctgacaactttccatatctcatcagcttttccgtaatcatgtctatactctttaatcccataaggaatacaaatgtttcatcaagcttcgcatatgatttccacctgatttcttcaatctccggcggcagattatcagccgtatgtcctgtaatcacatgaaatccacggcttgcccccctgtgtgttaccggaattcccgccattccacacagaccgatacttgatgtaacccccggaacttcatgcactggtattccatgttctttaagtgccaatgcttcctctccaccccttccaaacacataagggtcaccaccttttagtctcacaacatatctgccttcaatggctttttctacaagaagctcattaatctcctcctgtgccttggaatgtctgccactcctcttaccggcgtatataagctcacagctttccggtgcgaactccagcagatgttcatctatcaggtcatcatacactataacctctgcccgtcttatctcattaaggccttttattgtgatgagttcatatgagccgcatcctgctccaacaagtgctgcccccggaagcactgtctcactcctgttatcaagatatttctgtaaaaatgcattttcttccttgttgctgcacactctgtctgctttcatgcagaattcagacacttctcttatatatgcagctctttttctgtcatcatctatcttttctttagcaagtgtcctgacctctgaaagataatctaatatgctctctatattatcagatacatttgcttcaaaatctcttcttaacttagctgcaacatgcggactcttcccacctgtaacaaagcctgcaaccatatcacccttctgcacaattgaaggaaatataaagtcgcataactcctgattatccacaacattgactggaatacttctttctttacacaatcttgcagcttctttatccacttcttcaccagccgctgcgataacaaaatccacattttcaatatcttcctgtgtgaatgttcttctttcaatgctgatattatcgcaagactgcgccactgcctctatgtcagaaactatagacggtgcaacaactttaatcttcacgccaaagcccttcagcctgcttatctttcttgctgccactttaccgccaccgataacaaggcatttctccccttctatttctttaaaaaacggaaaataactcatcctgttcccctttttcttgtatttattgtcatgatacatgaaactgttaatttctgtttgctttagcctgattttctttgcttgttgtcatgatacctataaatagtcgcatattcagcaatttagtaggtaaatttcgattgtgactattataatagtgctacatttttactaaaaatgcctactaaataacatattccatgcttttagtaggcatcttgtgtcatatattctattattctgctaaaaaacacctaccaaatcagcacatatgttaatcttataggtattcagccagaaattgccttcatattcagcaatattatgctttcaaggcgcatccactgtccgcgacacggctatagcaagcctcagccaaccgccacatcagggatgttctccaggcagcatgccacaattgctccatcagcccatctcaccacggatatcaatcttaggcggttcaattggataattgcctgtaaaacatgcgtcgcagtaacctgtctgtccacatatcatctcacttaacttgtcaacctcaagatagcctaatgaatctgctccgataatttcacagatttcatctacagaatgacctgatgcgataagctggtcttctgatggaatatctgttccaaaataacatgggtgaaggaacgccggtgaactgattctcacatgaacttccttagcacctgctgccttaagaagattaacaattcttgcacttgttgttcctcgtacaattgagtcatcaatcatgacaactctcttgcctgcaactgcttccttaagtacattcagcttaaccttaacgcttgactctctctgttcctgcttaggcttgatgaatgttcgtccaacatagttattcttgataaatgcattaccataaggaattcctgattccattgagaaaccaagtgctgccggattacctgactcaggaacgccaacgacaatatcagcatctacatggtgagtctttgctaagattctacccgcattaattcttgactcatatacgcccattccgtcaatcttgctgtctggtcttgcaaaatatatatattcaaatatacatcttgctgtatttttctggcagagtgacttatcagacttgattccgtctttagtgatagtaacaacctcacccggctcaacatctcttacaaactctgcacctacagtatcgagtgcacatgtctctgatgataagaagtatgcattatctctcttaccgatacataatggcttgaaaccaaatggatcccttgctccgataagctttctaggactcattacaataagtgaataagcacccttaatcttcttcatcgcatttaacacagctccctcaacagtcggaacattaagtctttctcttgcgattaagtaagcaataacctctgaatcaatagttgtctggaagatagctcctgtataagaaagctcttcacgcagttcaacagcattaagaagattaccgttatgtgccataccaagagttcccttaacatagttaagaacaagtggctgtgcattctcacggctgctgcttccggctgttgaatatcttacatgtccgacacctatattaccattaagcttttcaagcttttcaggattaaagacttcattaacaagtcccatatccttgtatgaaagaacctttcccttaggtccttctgtatcactgactgctataccgcagctttcctgtcctctgtgctgaagggcaaaaaggccataatatattgtggatgaaacatcattgccatcgaaatcatatacaccaaagactccgcattcctcatgaagttcatcttcagcatagtagctgtcattaatatcaatctgattcataattctccattccttatcgactgtgattatttgcgggaaaaatccttaccagtaagaagcttatatgcttccttgtacttctcaactgtcttctcgattacatcatctggaagtaaataatcactgtctggattagcctttaaccagtctcttacaaactgcttgtcatatgatggctggctctttcctgcctcatatccttctaatggccagaatcttgagctgtctggtgtaagcatctcatcaccgataacaacttcaccgttctcatcaagaccaaactcaaacttagtatctgcaataataatacccttgcttaaagcgtactctgcacatttcttgtaaagagtgatagttgcatccttaatcttagtagcatattccagaccttttcctgggaactgcttctcaagaacttctatactcttctcaaatgaaatattctcatcatggtcgccaatctcagccttagtacttggtgtgtagattggttcaggaagcttctctgattccttaagtccctctggaagcttgattccacagactgttccattttccttgtagcttgcccagccactacctgttatatatcctcttacgatacactcaacaggaagcattgtaagcttcttgcaaagcatgcttcttccaatatattcatccttgtggaagaactctggcatgtcattaacatcaactgaaaccatatgattagaaacaacatccttagtataatcaaaccagaactttgacatctgtgtaagaattgctcccttttctgtaaccttattctttaaaatatgatcaaatgctgagatacggtctgtagcaaccataacaagcttgtcatcgcaatcatatacttctcttacttttccttcatagagtaattcacattttcccatgagttcatccatccttttcttcttaataaaattattagttaaaaagttatcaaaccgtagtatttatgcggtttaaaaacaaacaaaaatattatataccagcgtccattcaaaatcaatagactttatcttttgcaataatgcattgcgcattacctcattaaagtgtattattaaaaatataaatatagtcagtttttagaagtgtactattcactcgaataataatattaagatgggagatttattatggctaatggaattgaaaaaagacgttttaaaagaatgaaagcagaccttacacttaatgtttcttctctttttaatcaggacaacatggaaattaagaatcttgattcacctatcaaggttatcaatatatctgagggtggtatagcatttgaatcaaaaagcatgcttcctatcaacttttattttaatgctgctcttaatcttggctctgaaacagatactctttacagtgttgtcaagattataagaagtcagccaattgagggcactgacaattatctttatggctgtgagtttgtcggcatggcaccgattcttggttatatctttgatgaatatgaggctgagattgaagccggaaaagaataaaagggactaaaggcaccccgcagttcttctcactgattgtctgattggctcttattgtttctcactgctttaaaaaattctgctgtagaaaagtatttccttaacacctcaaataaagtatgtcatcttgttgtatcttatattggggaattttagcacattgttgacagcaatatttacttctagtaacatatagttatattatagttcggaaataaatagttaaacatgacagtatgcacataaaaaggaggtttttatatgcacacaacaaaaaaagcagcatttctttctcttataatcttaataataattatagctgcattattactaagacctcgccacattaagcttgacttatcagataacagcaatatttcaattgtaagagaaggaaacgaaataagtctgacatctgatgaaaaatcacaattaattgatatagtagaagatataactgttatgccatggctatttgcgcctgcatctggatggacttacagaatattatataccagcacagacaatcgtactaacagcattattgtgcttgacaataaagtcacaattaacagaatgagctatcatcctttcggaaagtctgcatcacttgtcacagattttcttgatactatatataacagaagccttgtaacaatcaatatagacaacgctgacagcattactgtcatcaacaaatctaatggcaaaactggcgtttttgaaggtgcaagactgaaagatttaacagacgctttagctttcacgccttctcacccagttacttttcatgatgacaatgattcttctgttcagtatgtactcaacatacaatataaagatggctcttctgaagaactgtctattgtaaaatgccctgcaattctttacaaaaaccagtatctgagtgttgacttatatgcattggaattgattcaggaagaagttgacaactaatgcaatatgagagccattggctaaatacgaacaattattagcagcccaaactgaaaagaaaaattaatacacaacgcataaatcccagcagcacatatatcagtgctgccgggatttctttataatatctcataagttgtctgttcacttgtaagacaatcacatccaacacgattctcaccacttgtaacaaatgatgaagccttaatgtgtatgtcagcgattgtctccggcatatcctttaacggttcaataacaaccgcttcctttgctccgaggcagttaattccctcgaaattaatattcttaaaataaggaatatcgtccttgttaattccgttaatctcttcatttctgttaagcaaattaagcacatatgacattgtaagaattattgcctgttccttaatatcaaccatattaatattctttacattaatattttcgataactccgcctcgtccaagcgcgctcttcatgcggactccgacatcagttccaaggaaagtacaattctctaccagtacatttttaataccacgactcatctcacttccgataacgaagccgccatgtcccttattaacaaggcagtcatggatatatacatcctcacaaggtccttcaatctgtcttgctacggcattcttgcctgactttaaacagattgcatcatcacctgtttcaaatgtacagttatggatatgaaccttcttgcatgattcaacatcaattccatcaccgttctgcgcataatatggattgctcaccgtaacatttcttactgtaagattcttacagaaaaatgggtgtatattccatgccggtgaattcataaatgttacaccatcaagaagaattcttttacagtgacgaaggcttaccattactggtctgtagaaatcataatattcgcttgctttctcaagtgcattctcagcgtcaagctggatattatgctcattacctttaaatgagctttctgtcggcatccatatgccgccctctttagtatcaattgtatactggctctttttcataagagcttcccactgtctgtcagtcaacttaaactgttttacagggcgccacagatcaccgcttccatcaataacaccgccaccggttataccgatgttaatagcattttcagctgtgataggagacttggctcttatacactcctgaccttcatagttagtgataataagtggatactggtcaatatctttagagaatttaagtattgcgttcttctcaattcttaactcaacatcgctcttaatctcgattggcgctgtaaaccagattccctcaggaatcacaacagttccgccgcccttttctgagatatagttaatagccctgtttatagcatcagcatttcttgatgcatcttcaatagtatagcagtatggtcttgcaccatagttgtcaacatatactattctgtcaacaaatgctgggagttttacatcaaaattaacttttttcattccacatctccttttagttttaagttcatgtgttactttaaaagctcctgtaacaaagcatttaccattcccggattagccttgccctgcattgccttcattgtctgtccgacaagatagccgattgcctgctttttgccgcctttataatcagcaactgactgtgggttatcagcaataaccttctcaactgttgctctgagtgcgccttcatcattaacctgctttaaaccgtgctcctcaacatatgcgtcaacatcaacattttcagcaaatacatgctcaaatatctccttagctgctgcattgttgatttcctttttctcaacaagagtaataatcttggcaaggctttcaggtgaaaatgttaattcctcggctctgaattctcttccagtcttagctgattcttccttcatgagtcgcattgtctcacccataatccagttagaaaccttctttggctggttgcagattgctgtagcttcctcaaagatttctgtgaacttcttagaatctgtaagaatctctgcatcgtattcaggaagtccgaattcttcaatataacgtaccttcttctcgtccttgaactctggctgttttgccttaagctctgctaaatactcatcactgatgtgaattggaacaaggtctggatctgggaaatatctgtaatcctgcgcatcttcttttgaacgcatagcatatgaatattccttgtcatcattccatcttcttgtttcctgtacaaccttctcgcctgcttcgattaagtcaatctgtctagctgtctcggccttaattgctctttcaatcgctgcaaatgaattgaggttcttagtttctgttcttgttccgaactcgcttgaaccacgctctcttacagagaggttgacatctgctctcatagaaccttcctgaagcttgcagtcagaagcaccaagatactggattgttgttcttaacttagtaagataagcaataacttcttctgctgaacgcatatccggttcagaaacaatttcgataagaggcacacctgaacggttataatctacatatgacacgccttcccactcatcatgaacaagctttcctgcatcctcttccatatgaatctcgtggattcttattgtcttttctgttccatctgataatgtaacatcaacatgaccgttacgacagattggaagataaagctgtgaaatctgataattctgtgggttatcagggtagaaataattctttctgtcaaacttgcagtcctgtgtaattgtacagttagttgcaagtcctactgctgctgcatattctacaaccttcttattaagaacaggaagagaacctggcatacctgtacacacagggcaagtatgtgagttaggcgctccgccgaactcagttgagcatccgcagaaaatctttgtcttagtagctaattcaacatggacttcaagtccgattacaacttcataatctttcatacttatgcctccctcctattcaaatcttcctcgtgcctgctcataagcgtaacctgcacggataagattattctctttaaagcagtcaccaatgagctgtaagccaattggaagaccattcttgtccttaccgcatggaacagaaagtcccggaagtccggcaagatttacagagatagtatagatatctccaagatacatcttaatagggtcagaaagtgatgaaccaagctttggtgctgttgtaggtgcaacaggtccaagaattacatcatattttgcaaatgcttcatcaaatgctttcttaataagagccttaactcttaatgccttaagataataagcgtcataatatcctgaacttaatacgaaagaaccgagcataattcttctcttaacctctggtccaaagccctctgaacgtgtcttcttgtacatgttgtggagtccttcgtattctttagttctgtatccgtatttaacaccatcgaatctttcaaggttagagcttgcttctgctgctgcgattgtatagtaagtaggaattgcatactctacaaggcttaaatcaaactcttctaagattgcgcccttgctctcaagaactttggcagcattaagaactgcttccttaacctcagggtcaagaccttctccaaaataatctcttggaataccaattctcattcccttaacatcatcaactaatgcctttgtaaatgaataatcatctcttccaattgatgttgagtccttatcgtccttgcctgcgatagcttccataatagttgcacagtcagttacatccttacataaaggtccaatctggtctaatgatgagccataagcgataagtccgtaacgtgaaacagttccgtaagttggctttaaacctacaacaccacagtaagaagctggctgtcttattgatccacctgtatcagaaccaagtgctgcaaagcactcattagctgctacagctgctgctgaaccacctgatgaaccaccaggtacatgctcaggattgcgtggattcttagttgcaccaaatgcacttgtctcagttgtagaacccatcgcgaattcatccatgttagtctttccgataattactgctccggcattctgaagtcttactactgcatctgctgtgtaggttggaacgaaattaccaagtatcttagatgagcatgtagtaagcatgccctctgtacacatattatctttgattgcaaatggtactccggctaaaggtcctgtaagcttacctgccttgatatcctcatctgctttcttagctgctgcaagagctttttccttgtcaaatgtgacatagcagttaagctcatcttcagacttttcaatctgtgcaataacagcttccatagcctctgttgctgttgtctcacccgctttaatcttagcagccagttcaacagctgtataatctaataaactcatatgcgtcctttctatgattcaacagttttaggtacaataaatcctgattcattacattcaggtgcattagcaagagttgcctcgcttccgtcaccattagtaacaacatcttctctcattacattattaacagggaacacatgtgacataggttctacccctgtagtatcaagctctccgagcttgtcaatataatcaagcatgctagccatatccttcttggcagcttccttctcttcatcagagagttcaagcttggcaaggataccaacatactcaattgtctcatcactaattacattagccatgtgtgcgtctcctttcgttgtcgttatatacgcctggagaaattggataaatcatcacaagacacgctttcgctacttgtcgctcgcagcggtactaagcgaaatcggccacctccgtctgaaaagccagcttttcagactccgccagccgattttgctaagtgccggcggctccaaagtgtcttgttcacgctttatccaatttctccaggctcacacatctcccccggaacgagacgcgacatcgctgcgctcgtcgccggtggcgaagtgtagtggaagtctctacctctttgcatcagaggaggtcatgttaagttagcggttgttggcaacgaacaggctgcgaggttttataagttcgcaagcaaggtgctttggagccgccggcacttaacgagttggaagcggctgcctttaggcagccaaattccaaggagtttagtgtccgctgcgagcgacaagcagcgaaagcgtgccttgcggtgaacttataaacctcgcagccgtccgtctaccactaatccctaaccttaatatgaacttccctaagctgctgctctgttacctcatttggtgctccgcacattaaatcctgtgctgttccgctcattgggaatggaattatctcacggatattctcttcatttctaaggagcataatcatacggtcaacacctggtgccatacctgcgtgtggtggtgcaccaaactggaatgcattatataatgctccgaattttgcctttaatacttcttcatcatatccggcaatttcgaatgccttaaccattatctgcatgtcatggttacggactgctcctgatgataactctacaccgttgcatacgatatcatactggtatgcaaggatatcaagtggatcttttgtattaagtgcctcaagtccaccctgtggcattgagaatggattatgtgtaaatccaatcttcttagtttctggatctctttcaaacattgggaagtcattaacataacagaatctgtatgcatttttctcaatgaggtcaagtctctcaccaagttcgtttctgatttgtcctgcgaagtacgcagctctgtcttccttatcagcgatgaagaagattgtatctcctggctgaagtcctgcaaggtctttgatttctcccttgagttcttctggaataaatttatcaattggtcccttgtagcttccgtcttcaagaacctcaaggtatccaagtccacccattccgattcctgtagcgaacttaagtaacttctcatgctgtccctttgaaagctttgcatgtacattgattgctcttacagtcttgttctggaaaggcttgaatgtacatttgttaaagaattctgaaaggtcaataattctaagtggattacgaagatctggcttatctgaaccaaactcaagcattgcctgcttgtagctgatgattggataaggtgcctgtgtaacttcgtatccttctggtgcgaattttgcaaatgtttctgtaagaacctcttcaccgattctgaatacatcttcctgtgtagcaaagctcaactcgaaatctaactggtagaattctcctggtgaacggtcagctcttgcatcctcatctctgaagcaaggtgcgatctggaaatatttatcaaaaccagataccataagtaactgcttatactgctgtggtgcctgtggaagagcataaaatttgcccttatattttcttgaaggtacgatataatctcttgcaccctctggtgatgaagcgcagagaattggtgtctggatttcaaggaatcccatgtctgtcatcttctgacgaaggaatgcgataacctttgacctgaatatcatgttatccttaaccttctggtttcttaaatcaagatatctgtacttaagacgtacatcctctcttacttccttagaagtctgcacttcaaatggaagctgctggtatacctgtccaagtattgttatcttcttagcttcaagctcaattgttcctgaaggaatcttaggattgtatgtctcctcatctctctgctccataataccttcgatagcgatacactcttccttgtgaataccatcaagtaatgttgtatcacgaagtactacctgaagcaccccatacatatctcttaaatcaataaatgaaactcctccatggtcacggatgttctcaacccatcctgcaacctttaactccttgccgatgtaactttcattaacttcacttaagttaacatctctgtacatgtttgccattgcaatctcctttcttttctggacaggcaaaatgttatgtcctgtcaaataaaataataatacctaacatcctgctatgctttttcgcgcaaaaaagccccaggatgtaatatacatcccggggcgaataaactgtgttatccgcggtaccacccgcattgaaaagttctaagcttctcatctcattgcacttaacgcgtgtaacggaatgacctacccagccgtggctgctcaaccatccaactccagagcgttcctcttatcaattccctgcgtatgctttcagtcggtggcatcgctttcctgtcaggttccatgaaaagaagtctctttcatagtctttaagatattcatacacatgaatgatatcataaagaatattacttttcaagtacaatattgtgttcttttatatatttaccaatctttttatcagaagcaagaatatggttagacagccagccaagcaggaatcctataagatccataagatattcctcctgattatcatccattgcctcaagctccctgaaatcaatatttacaagcttttctacaaatgctgaatgcgcccttttctgtgcttcgatttcaggatatccgattttcttcatcagttcttcctcatcactgaaatgcgtctccgtgtattccctcagttctgagagaagtcttatgatttcatcatatttatcatgaagaagttctgcatgtataacatcattagtgtccctgataatatcaaaaagatgcttatgctcctcatcgacaagctcaattcctgttatatatttgtctgtaaatgcaaatgcgtcatcaacattagtttctggtgccatctttccaatcatcatgtcgctgctcaagatgtggctgtaaagccatctggtaagataaagcagcagctcattaagagaatttgttgctgcctccggtgaagattcatctaacttaaatgtattaatcttttctgcaaatgctttgtgttctctctgctgtattggcagctccgggtcatgaatactcttcatgtattcttcttcatgagcaaaatgtgtaacaacataatccttaagattatctataagattcttcgcaattgacgcagcattatctgtttcttttaccagtgcaaatgcttcattaagcatctggaacagttttctatgttcttcatcaatattatcaatgtgtatcatacagtcttctgtaaattcgtacatatatatcaatctcctcgtgcttatatttgccttgtattataacaccttttctttaagctgtgcaatgctgtccacctgaaacattaaatatctgtttttaatgagtatattcacaaaacaaatgtagtttgtcaaaacatttaaggctataattaacttattgaaagcattttgctttgcaaaacaacggaggcaatacctctgctcctgcatgggcagtcgcattttgctccgcaaaacaaggaggtatgtatgaacatttatcttgctggagactctattgtacagaattatactgaggaagaatttattgcaggctggggacagttcctgccacgcttctttaagcctgatgtaaatgtatttaactatgccaaggggggcagaagttcaagactttttattaatgaaggaagatttgaagagattgacagacatattcagtccggagactatctttttatagagttctgtcataatgatgacgattcaaaggattacaaatctatgtttaaccgtcagactccgcttggcgtaccagatgaatcaggtcgatttcctgttatagcaggagttaagatgcctaagaattatataccacctgaatatattgaggcacttaataatgatgattcgataactgataaacaggctgttcttaacagtgttctagccataaaccagtcttatccatatgacacttactatccatactcaaaagacgcttctatgggcagttacaaatggttcatcaaacagtttattgatatggcaagaaagcatgatgcatctcctgtattagttactgcaccagcaagaacatttttcaatgctgacggaacaattatggacgctcccggctgccacggtggcaataatttcagctatataagagctatgcgccagattggtgaagaaaccggcacacctgtacttgatctgttttcttattcagttgaactttttgaaaaaatcggacatgataacatccacagatatacctcaatcaaaaaaggtatcaataaaggaaaatggcctgacgatttcttaaaagaactcgccaagccagatactgtttctgagaatacacattttaacaaggacggtgcaatgcttatcaccgaaggtctggtagaactgattcttaaatccaagaacccccagctttgtgaattgcagtcttccctgcttcataacgtggtataagtatattacttattaatgaattcccatgcttctttggggctgtgtacaacaaactcagccccattttcctttaggaattcttcatttctgaaaccccagccaaccatacatacatccattcctgcattagccgctgtctggacatctacttctgaatccccgacatatacagcctgtgttctgtcaacatcaaactgtcttaatacttcattaacgctgtccggatatggttttcttcttatgccttctctctctccaaccgcataatcaaatagtcccggaaaataatctttgcataaagtctgcactccataatcagccttattagatacaaccgcagtgtacacaccggcatttcttatattctcaataagttcttttattccatcataaggtcttgtcttatctgcacagtgcttcttgtaatgctctgtaaatgtttcatgcactttaactatcatgctttctggtgttccctgtggaacagctctttccatcagctttcttatcccattgccaacaaaatgtctgatttcttcaatcgtcctctcaggcatgtcaaatactgaaagtgcataattagtactatctgcaagatcctccaatgtattaagtatggttccgtcaagatcaaatataacgattttgtatttcatatatcctccttgttatggcttctttatcccagcagctcctcaattatatcgtaatgctcatcaatcgctgcattaagtgtctcaatatccttctttataaggctatcatatatcatttcatgtgtctttaaaagtttctttttcttaattccatctgcatgctttatgacataatctatccattcgcggtagacttcaacaacagcttccatcagtgtaatccacagattgttgcctgtatctgcaatcagttcctcgtgaaatgctttatcaatatcaacaagtgcatcacctgtttctgtcatcatccgattaaccatgctttccagtcgctcctgttgttctttcataagacctgtatgtattactgcattacacactgacttttccatcatgcggcggaattcgcacacttcgcgcttagtaacagtttttaatgcaatcatcattaatattgtctgctttatggactgcccgacattttctgatatataattgccagaaccctgacggcgttctataagtcccattccatgcataatacttaatgcttctcttgttgaattgcgtcctatgccaagtgtttccgcaagtgcacgttcagtaggcagcctgcttcctattgtaagctccccgcttttcataagctcataaatatattgaattgccttttcgtattcctgcgatattttcttctgattcatattatcctgtttcagcttataacacccctgtctcattaatataggcttctataagtcttagtgcaccatcttccccaacctttgaaacatctatgcatatatcgtaatattctgcatttccccattcttcacctgtataataattgtgatatgagcgtcttctaaggtctgtatcttcaactatcttagctgctttcttagggctgacattgtgcttcttttctataagttctgctcttttttctttgtttcctgtgagaaatactgatataacatcttctctgtgtctgaatgcattgtttccgcatctgccgacaactacgcaattttcattaccgattatgtcagccatagccttgcgtggagtttttccattatctgatgtatcatcacctgccattgtgtcagcatacagcatcatatcaagtggcatttctccataaaaatatggatatttttcatacagacctttctcttttgccagcctacaaacagcatccttatcataaaatggtataaaatatttctctgccagtgcttttcctatctggtcacccatacatccacattgtcttgcaattgtgattatcatatatacctcttttctgcgcacgcttttttgcgcataacaggtttgtgccaagtgcgcgcaggcacaaaccccgcatgtgaaaataatatcttcacactgttctcctaattacctactatttcatcatatttagcaatctagtaggtcttttccacattgttagttggtttgtaattcttcttttcaactcaaatacctactaaataaacactgttcacacttttagtaggtctttttcttatatgtctataatatcagacagttctaatcagcaaaaagacctactattttggcttaaattatcaatttagtaggcaattttctttatccgcattaattatcctcagaattttctctcaataaacctactatttcatcacatttagcagctttaataggtttttaccccattcatacattaatttcatatgccattttacactatcttttacataaatccagcaaatactgatgaaagtacaactgtaagtatacctgcaactgcaattgataagctgctcattgcaccttcaatttcgcccatttccatagccttggctgttcctatcgcatgtgcagcagatcctaacgcaagtcctttggcaatcggttcttttattctgaatattttacatataagctcaccaaatatatttccaagaactcctgttacaacaataactgcaactgtaattgttacataacctccaagttcctcagaaactcccataccaatagcagtagttattgacttcggaagaagagtaacatattctgcatgactcagattcataattttagataacacaagtaccgttgttaaacttgtaagcacacctgatgctattcctacaacaactgccttgtaattcttcttaagaagactccactgctcatacagcggaattgcaagacatacagttgccggtgtaagaaaccagctaagatacctggcaccctgattatatacatcataatcaacacctgatactgcaagtactattattgttattattattgatataagcagtggattgaatattccaagcttgaattttttcttaagcacagaaccaataaagtatgataaaagacttaatgtgactccggcaaaaagtgattctctgaaaaaatcattcattagtattaacctcatttctttgtgctttgcgtaattctctcttcctgtcagcacgtatgattatctgggaagcctgacctgtaaccgccataaccgtaattatagcaacaaccgtaacaacaagcaccggcacgagcataggttttaataccccccatgaagacatcagtcctactcctgccggaatgaacataacaggcattacagctataagatattttcctgcgtcctttacccagctaagctttataagtccggtaagaagtccaacaaaaagtatcaccattccatatatactggctggaaccggcagcggaagcagatatttaagtgcttctccgacaaatgaaatagccagtattataagaaactgtctcaataatttcataacatttctccataaataaaaatttgcggtgcaaattggtgctaccaattcataccgcaaattataatacattcttatgtacaataaagcaaggacttttttatgctcttcttgccttagctgccttaagcagatgttttgcaagaactgatgttgttaccgaacctactcctccaggaaccggtgtacatacagaagcgttccctgtaacatcttctaaatcaacatcaccacacagattgccgtcttcatcaacatttattccaacgtcaattacaactgcaccgtctgcaacaaatgatttgtcaaccatctttgcaacgcctgctgcagcaacaagcacctcagcacccttacatactcccggcatatcaactgtcttagtatgacacactgttactgttgcattcttcttcataagcatcatcgcaaccggcttaccgataacaagacttcttccgataactactgctctcttaccctttaagtcaactcctgcataatctaacatctcaattacagcttctgctgtacatggaccatatcctgtcggatcccctgcatatacctttgcaagattcataggtgatattccgtccagatctttcacactggcaattctgttctcaattgccttctcatcaagatgctttggcaaaggtcttaaaagaagaattccgtcaatatcctcatcttcattaatcttgtcaaattctttctgaaaagtatcattatcaatatcagcaggaaatgtatatgaagtacatctgaatcctactttttccatcttcttggtagcgccacgctcatatgacatatcatctggtctttcaccaacacgcacaattgcaagatgtggaattgcgcccttccagtccttcatctcttcaataatcttctcattaatagcattagcaaccggtaatcccttaagtgtctccatatattcctccttgtttcacaatcttgttttatggtcttacagcgtccataactcttccaaatgtttcttcttcaatctgtgctgcttcagcaagcatcttatctgccttaaagttcatatcttcagcaagttctctgtccttcataagctttgtattgataaatacattaagcgaagcccccttcattgcagcctcacacattgttatgccgacacccgcatcactgattgcaattctgcttccaattacagatatacggtcgataagcttcatggcttcaagtataagctccatcattgacagaggggcttctgaggctgtaacaagtgcctttgccataattgcttctctttccttaatctgttcttctgtatccttaggaagaccataagctgctgcaagaggcttaaagctttcagcatccttatccatacactctgcaagtctctttgtaaggtctgtcgctttaacaataagttcttcaatctcttcctgatactctgcatatttcttctttcctgtagtaagtgcaagcaccatattaccaaggctcatgcctactgctgccacatatccgcacgctccgccgcctcccggcaccggttcacttgaagataaaaccgcaagaaaattatccattgtcatatctgtcatcatattaaatatctacctcccctgtaaatactgttttcgccgggccttcaagatatacggtattctcatctttatcccatgtaatctttaagtcacctccaagaagatgaagtgttgctgttgtgtcgcacattccgttaagaacagttgcaacaaggctcgcacatgcacctgtaccacaggcaagtgtctccccggaacctctctcccacacacgcatattaagattattcttatctacaacctgaatgaattcagtattaattctctctggaaatgctttgtgattttcaaagaaaggtccgattttttcaatctcaaatttcttaatatcaatatctttatcaagataaacaatagcatgaggattacccatagaaactgctgttaccttgtactccttaccttctacaacaatagtctcatccacaacaggtgtcttaacaacctgtccggcaattgtctctgtctcacagcctttatattctttaagttccttcgtatcaacaggaatctgtgctgcctcaagaattggtgcgcccatgttaacccttgccgtctcaaccctgccatctgcaccggttttaagttcaagtatcttcacacctgcaagtgtatcaatagtaactgttgtcttatctgtaagtccattgtcatacacgaactttccaacacatcttattccattgccacacatctgtccctgcgaaccatctgcgttgtacatctccataaagaaatctgctctatctgatttcttaataagaataagtccgtctgaacctactccaaaatgtctgtcacttaagtcaattgcgacctgtgacggattatcaattactgactgtgtgcagtctacatatatgtagtcgttgcctgctccatgcattttagtaaacttcatactgcgtctcccttttcctaatatattataaatgcagtgatatatcacatttgtcatacatcctgatatattcccatcaccatagttgctgactctaccattgtattgccactgtccatgctgcatttctggatatatctgaatgcttcctgctctgacatattatttctttccataagcagatgctttgcatcatcaattatcttctgttcttccggacttctctttcttggctgcgaccgcagtttctttctgcgccttatctgtgcctgaagcatcatctctatagttgacacaaggtcattaacctttattggcattgccgcacatacaattccattgtcctgacaatcttcccatcggttctgggacgcaactaacaacatctcaaagctctttggcttatattcatataattcagtataaaccatattatctgacagcttatatccgcatattattattccatcagacaaggtatctgcctgattgattgcctgtgctccactcgtacatggtacagcgacatcaaagcctctgtgaatcaaaaggttccttactgctttagcctcctctaacttaggaaatgctacaatcaatgtggacatcaattaactccttttctacttagcatacgctttaccatgtttaatcaatacttgtagagatattcatctatttcccactgtgagactcttgttgtatagttttcccattctttcatcttagcttcaacatatttggctgtaatatgttctccaagtacgctgcataaaaactcatctgccacaagacagtcaactgcttccttaaggtctgccggcatattctctattcctgctgcccttctctcgccaggtgtcatctcatatatattgcagtcaacactatcaggtacttctatcttgttcttaataccatcaagtcctgctgcaaggcagagtgccagcacgagatatggattagctgtcggatccggatttcttaactcaactcttgttccatttcctcttgatgcaggtattcttataagcggacttctgttctttgctgaccatgctatatatacaggtgcttcatatcccggaacaagtcttttatatgaattaacaagcggattagttattgctgacatacctcttgcgtgcttcataataccagcaataaaatgatatgcatcatctgataaaccaatctttccattctcatctgcaaatatattcttaccctcttcagttgcaagtgacatattaatatgcattccagaaccgctgataccaaactttggctttggcataaatgttgcataaagtccatgtctcttggcaattgtcttaactgtcatcttaaatgtctgtatattatctgctgtctttaaagcctcatcatatttaaaatcaatctcatgctgtgcaggtgcaacctcatgatgtgaagcctcaatctcaaatcccatgtcctcaagagtaagaaccatatctcttcttatattctcgcccaggtcattaggtccaagatcaaaatatccagctttttcatggcttaaagttgtaggaagtccgttgtcatctgtatggaataagaaaaattcacattctggaccgacatcaaagcggtatcccatttcattcgcttctttaatagttttcttaagtatccatcttgggtcgccctcaaaaggcttgccatctggtgtatacacatcacagataagtcttgcaacctttccctgctgtggtctccatgggaatatttcaaatgtatcgtagtcaggatacagatacatatctgactcttcaattcttacaaagccttcaacagaagaaccgtcaaacatgcatttgttatcaagtgccttctcaagctgacttgaagtaattgcaatattcttgagtgttccaaaaatatctgtaaactgaagacgtataaactctacatcctcttcttcaaccattctgaatatatcgtccttagtgtatctgctcataagaaacctccgttataattatatatttcttattgtggcttattgccaacttttataaatatactacattttaatctctttgtgtagaatactaatatttttcttgaataattttgtttcttaatgtaccatagttatgcatattttgtctttttaagacatatattaataattttaagggagataaattatggctaagaaaacaaatgtacctcttaagagacgcagacgctctgggcttaatgtaaaacttattgctatcattgctgctgtactctttgttctaactataggtatcgtattggctgttattggcggtcacaaaaaagaaaagaatccttctgttgccgataaccagaataatgagactactgctgaacccacaacagaggaagaaactacaaccaaggttccgactgtcgaagtcgaccttatgatgattggtgatatgcttatgcatgaaggtgttgtaaaaagtggtcttatggatgatggaacttacaacttcgaccacctctacactaacatagctaaggatataagctctgcagacataaaaatcgttaatcaggaaacaatcctcggcggttctgattttgcttacacaggatatccaacatttaactcaccatgggcacttggtgatgcagaagttaaagcaggcttcaacattatccttcatgctaccaaccacacattagacaaggggcttaagggtgttgagaactgcctttcattctggaagacttatcatcctgacactactgttcttggtatcaacgaaacagaggaagactatgagaatatatatgtttatgaaaaagaaggcttcaagatagcatttcttaactacacatacggaactaatggaattcctattcctgattccaagccttatatcgtaaacatgcttgataaggataagattacagcagatgtaactaaggccaaacagcttgctgatatggttattgtacttccacactggggtactgaatatgtctacacaccagattctaaccagaattactggacacagcttttcttaagccttggtgttgatgttgttatcggtacacatcctcatgtccttgagcctgtcgaggtagtatctgatactaaggggcatgaaatgcttgtatactattcacttggtaacttcgtttctaatcaggatcagaagcctcgtatgataggcggtatggctaagatgacacttgttaaagatgaaacaggctgttatgttaagaattataatcttacacctgttataacacagaagcttttcggccagaaagcaatcactacatataaattaagtgattacacagaatcacttgcatcaggaaacgcaatccgcaacgattccggctgctatgatttcagcctttcatactgccagactctcattaagcagattcttggcgatgattacgatgaaaacacaagtgaattaaatgtttcacttcatcctgatggtcttgttaaagatacatctgcaacagaaagcagttcttctgctaagtaatgaaaaaagcagtaattttttaaaatgtaaagagatatattgatactaagcattatccgaggtatcagtatgtctcttttttctaataaacaaatgcgcattatattcatatactgcgttataatcattttagtaatctgtggcataataaccgcaaggcataagcaatcctcttctgaaaatcctgcagacacatcttcaattactaatgagccacctaaatcatcagacagttcaggtacttccgataaatccggttcatcaaatgattcaagcagctctaatccgtcaattccatcagattccgacagattaccgccatacaactcatccaatcagggaaacggaattggcggcggtgcaatcatgggcaattgcagcataggcagccgtaaacttcctatatactgtgttgaccttagtaaaaagactaatctcgatacctccaaaaaatatgtttccatatcatttgatgccgcatggggcgatgaagatactataaagattcttgacattcttgataaatataatatcaaaaccacatttttcatgaccggaggctgggtggacagctaccctgataaggttcttgaaatctataaccgcggtcacgatctcggcaaccacagccagaaccataaagaaatgagtaaactttctgtaggtgaacagaaagatgaaatcatgtctgttgccaataaaataaaagaaatcaccggatacacaagcttcctgttccgcccgccatacggtgattataattcaacacttattgatactgtctatggctgtaacttctatcctatagaatgggatgtagattcccttgactggaaggactatggaacagacaacataattaagaccgtgacaacacataaagctcttaagaacggttccattattcttatgcacaatggtgctaaatacacagctgaagctctcgaatctgtaataaccggcctgcagtcacaaggctacgaaatcgtgcctgtatcgcagcttattaatactgagaatttccatatggatggaaccggtctgcagattcctgactaattaataattcttatgcataaggtgctttgtataaagtctggcgccttatgcaactttattattgtaatcggtaacatatacttcactggcaatctctcttgccttttctacaatcttttccaaacgagacatgacttcatctgaaaaatacttttctccacattcctcacattcctcacaaggaacattcttaattataattacacaattatcaaaagtaacaacatgtgtcgtaaccgatggttttgttgttttacatttacaataaaaacacatactattgctcctttcttgtctttaaatctgcttcaaacttatccgtattaggataatatgctgttactatatacacattatctccatcataacctaatacaacatgtataactctgtttcttaatgtatatccaaatatcagacagctaggataaggataatcattagtataatgttcaataatctccccattcattatacaattaataacatcattcctcttgatatccctctcagccattcttgctgcaacatgtactgaccactttatcttccttaatgtacatgcttctcttatttttcctatatccatatataccctctctttatcatattataatctttttaatttaattatacaactcgcttttaattttttataataaacataatatatcataaataatatttattgtaaagttgttaattattt

SEQ ID NO: 8498 - DNA, 102024 bp, Unknown
  gut microbiota DNA sequence
aacaagccttggcatccttagccacttcttgaaattttgtcattcccatactgtacatttttgcaccatctgaatatcttacaaacttttttgcatcctcatatctatctttcttctttgattcattcattgctgtgctcctttcactttgacttcataacaaatgacgtattttctccataacgcaaaaaagaggacatcttctaaatttctttagaaaatgtcctcttagtagttcatatttgattgaatctttttcttttcagattgtgtactctttcatactgatgtaaatgactatgtcaaaatgcgtcttttaatgcgtcctttgacgtactcaaatgcctcaaccccgcataaacactaggtttatttatccaagctcttcattgtcgggaagagcagaacatctctaattgcaggtgaatctgtaagcagcataacaagtctgtcaataccgtaaccgataccgcctgttggtggcatacctactgcaagtgcgttaaggaagtcctcatctgtgtgctgtgcttcctcgtcgccgttctctgcgttcttatcctgctgtgcgaaacgctctctctggtcgattgggtcgttaagctctgagtacgcattacacatttcccatgtgttaatgaaaagctcgaaacgctcaaccttctctggatcagatggcttcttcttagtaagtggagatattgcaagaggatgatccataataaatgtaggctggattaaattctcctcgcagtactcctcaaagaagaggttgatgatgtcgcccttagtatgacgctcctcgaactcaattcctctctccttagcaagagccttagcttcttcatcagtcttaattgtatcaaaatcaacaccagcatattccttaattgcgtcattcatagtaagtcttctgaatggctttccaaggtcaatctcagtgccgttgtaagtaatcttagttgtaccacatacagtctcagcaaggtgtctgaacatactctcagtaagttccatcataccttcgtaatctgtgtatgcctggtaaagctccataagtgtgaactcagggttgtgtcttgtatcaacaccctcattacggtatactcgtccgatttcgtaaactctctcaagaccaccaacgataagtctcttaagataaagctctaatgaaatacgaagcttaacgtcctcgtcaagtgcgttgtaatgagtctcaaatggtcttgcagcagcaccaccagcattagatacaagtgttggtgtctcaacttccatgaagtctctgccatcaaggaactttctgatttccttgataatctttgatctctttacaaatgtttccttaacctcaggattcattattaaatcaacatatctctgacggtatctcatatcagtatctgtgattccgtggaacttttctggaagtacctgtaagctcttagaaagaagagtaatctcctcagcgtgaactgaaatctctcctgtcttagttctgaagataaatcccttgataccgaagatatcaccgatatcagacttcttaaagtctgcatatgcttcttcgccaattgcatctcttgaaatatatgcctgcattctgcccttaagatcagcaatgttacagaaagatgcctttcccattactctcttgaacatcatacgtccggcaaagcttacattaattggagaagcgtccataatggctcttctctcattgtaatcagcagtaactgcttctcttgcctgctgctcatctaaaccttcagtattaactgctggtctgtcaccaagaagttccttctcatgtgcttcatagatggctctgatttcatctgtgtgatgtgttacatcatactttgttatctggaatggatccttacctgcgtcctgaaggttctttaacttttccatacgaaccttaatctgctcgttaacgtcaggctgctgtgcagatttattatctcccatgaatgagtatctccttttctatacgttactgaaatatatctttattagtcgttctctcagaaattagtcgttctttacagatacaactgtatattcaatctctccaacaggtgcttctaccttaacagtatcacccttcttctttccaataagagctgcaccaagtggtgactcattagaaatcttgttattaaggctgtctgcctctgatgaaccaacgattgtatactcgatatcctcatcgaattctacatcgtgaagtacaacaacgctctccatcttaactacatctttattcttatcgttatcctgaataacctcacagttagcaagaattgcttcaagttctgcaatttctgtttcaatatctctctgctcgtccttagctgcatcgtactcagcattctctgataaatcgccctgctctcttgcttcctttaacttctgggcaacttcctttcttctgacaaccttaagctcctcaagtcttgctactctttcgtcatacccctttttagtaagaaactgtttctctgccatgttcttatcacctttctatatatatgctacactaatatgcttctgctctactagagaataaaaccccacaagcgtcacaatattataaactatcagttcctgtctgtcaatgtaacccttccagtatcctatccacaagcccatcaaactgttccagattagtaacctggttagcttcatttcttaatgctgctgcatgcttgattcctgctgtataccatgcaaaatgttttctcatctcgcggattcctgtaaactcgccttttatctcacacagtcctttggcatgtctcttaatcatctggcatatttcttcaacggatggtggttcaattattgtaccattattcatatattcagaaacctgtctgaatatccatggatttcctcttgctgcccttccaatcattattccgtcacagcctgtatgcttcatcatattaacagcatcttcgccgcttttaatatcgccattaccaataactggaatcgatactgcttctttgacctgtcttattatatcccagtctgcatgtcctgaataatactgctgccttgttcttgcatggactgcaacggcagccccgccagactcctcaataacatgtgctatctcaggcgcatttatactattctcatcaaatcctgcccttatcttgattgtaagcggcttatcaagtgcatcagccatcttctcgactattcttccgacaagcacagggtccttcataagtgccgaaccttcgccgttattgactacctttggaacaggacatcccatattgacatcaattatatcaaactctctttctgaaagtctcttcgctatatcagccatgatatccgggtctgaaccaaaaagctgcaatgcaagcggcctctcctctggcactgtcttcatcaggtcttctgtattcttattgttatacagcacagccttggcactgaccatctcggtacacataagcccgcagccctgctccttgcataaaagtcgaaatggcaggtctgttactcctgccatcggtgccaatgcaatattgttctttatctcaacatttccaattctcataattactccatgcctaagaagaataccttgaagaacatctcaagtgattcaagaagttctctcttctcatactgatacttcttgacgagcataccgcatgctatctcgtcatacagtaaatcgccctcgtctgctgatgatttgaacaaaagattgccttcctcatcgaattccatatcaagtattccaccaacttcctctgtgaaaagaacgcacataatctttaactcgttctttacatcatccggaagcttatcaaaatcatggttaaaatagtatttcttctcataagaattagatacacataaaactacattttcatcaaacatatccatataatcctctcacagaaacctctccggttctgataatcttctcgccctcgtctgtcttaatgataagttcgccctcatcattaattccaagtgcttttccaacaatttccttgtcagcatatattgccttgacgtcgccgcccttattgacaagcattgaattatagtcttctttaagcccagccagattctgtgtcttaacaaatgtatcatagtactttgcaaagctctctgaaaatgcggctactatacggcttcttttcagatggtcgccagtctcaagatacagagaagaagctgttgccttgattgaatcatcaaattctgtcgtattaacattaattcccataccaataactacataatgtatgtaatccatctcagcactcatctctgttaatattccacataccttcttcttattaagaactatatcattaggccactttatacggcactctgcatcatgtccgtcctctgtaagaaccttgtggattgcctcctgcacagccatggctgccactattgtaagcattgacgcattgactggtgcaatatccggtcttaaaagaagtgacatccatatcccacttcctgcaggagaaacccaattcctgccgcgtctgccccgaccacctgtctggctctctgttatataaagtgttccatcagctgcattatctctctctgccgctctcttagcttcattgttggtagaatctgtctcgtcataatatactacttcgcggataatccctgtcgtattgcctgtatccacacaggtaagctgactcattatctcgcttgatgtaagaatatcaggatactgtgttatatgatagcctttattctggactgcctctataacatagccttcttcttttaactggtttatcaccttccaaacagccgttcttgaaacccccagcatattgcacagtgcctgccctgacacatatccatctgattttctcaaaacatttaaaatcttagtcttcataccattacccgccatgctattactgccataagcagaagtcctaacgtaacaactgtaagaataactcctgacaccgttctgtcactcatgaaattcttagctgctgtaagtccgttaactaatgctccaagcatgaattccacagcaaataatattccgcttccgctgcgcaggaaaagtataattatgaataccactcctattgcaaatgtgagtgctatattggcatagtctatgagcatcttactctttctatacgcgccactcgttgtataatacataacgcctccataccttacgaattaaccgttgccaattacatttttacttataagctccaagtgtagctgccattacagccttgattgtatgcattctgttctctgcctcatcaaatacaactgactgatctgactcaaatacttcatcagtaacttccatctcatcaagaccgaatttgtcatgaatttctttaccaatcttagtcttaaggtcatggaatgctgggagacagtgcataaatattgcatccttagaagcattgtccataactgctttgttaacctgatatggaagaagtgccttgattctttcagcccatacttcatcaggctcgcccattgatacccatacatctgtgtataatacatctgcgtccttagttcctgccttaacatcttctgtaagtgttacagaaccgccgcttatctttgcccattcctcacactgtgcaacaagttccttgtctgggaaatattccttagctgtgcaggctgtatagtgaagtcctaacttagtgcagacaatcataagtgaattacccatgttgtatcttgcatcacccatgtatacgaacttaacgccctttaatctgccaagcttttccttgattgtaagcatatctgcgagcatctgtgttggatggtattcgttagtaagtccgttccataccggcacgcttgaatattttgcaaggtcttcaactatctcctgaccgaatcctctgtattcgattccttcaaacattgtacagagaactcttgctgtatcagcaatgctctccttctttccaatctgtgaacctgtagggtcaagatatgtaacacccataccaaggtcatgtgctgccacctcaaatgagcaacgtgttcttgtacttgtcttctcgaatataagtgcaacattctttccgataagtggctgttctacaatgccctttttcttcttatccttaagctctgctgctaagtctatcaaatataaaatctcctcaggtgtgtaatccttgagtgttaaaaagtcgcgtccctttaaatccatgacatcctcctgtctgtatggcaaattcgcctacattgaataattaataactttgttcattctatcgcaattatagttcttcgtcaaatgcgttgtttaatttgtgtagtggcaagacggtcggttgtgggagatggcggagagcttccgttaaacttcccggcataataataggcactgggcgttccatgcttcgtccccgaccgttaacgctggcaacgcacatccttgtgcgcgccagctcacgcgtccgtccatggacgcgtgtacactcattctttctacatgcccagtacctttattatgcgttcagtttaaagtcagctttccgccatcccccacaacctccctttctccacacttctccaaattcatggcagagtaactttcctctcctacacctctccggactggttcgactttcggctgccagtttaaaaggctgcacaaccactctactttccatcaaaattcatgggaggggctttgccccgtcccatgaatattccgcatctgccacgccttccgtccgccaataaaaaaggtggtgtggcttttctgactgcaaactatgcacataataaaagcattgagcaaagtcactacctaagtgtacgcgcgtccacggacggacgcgcgagctgtctcgcacacggatgtgcgttgacagcgtaacgagaacttaaacagccttccacgctcaatgcttattattatgtagcgtagtttgtacggaagaaaaccacaccaccttttttatcccttaatggaatatatgatctccaattattacaaaatctgaatagttgttaacatctacagtatataatgccctgaatgatgtataaccacctatattattaacgcctgataatgcctcaagtgctgcctgcatacattctgtgtttcttggaccatttgcaagtcttgctgcaaatctgtctgatggattgcctgcaccatctgatacacctgagaactgtgatctctgatatataacccctgtaactgtaccaggataatgtccgcttcttactctgttaagaataacatttgcaactgcaagctttcctgcatatggctggtatccagcctcccagtctatgatacatgccataagccatatatcatcatctgatacgctcatagttgggttatatgttatatctgttcctgatattgtattagcaattatcttctgtcgtcttgcttcctctgctgcagccgccgctctttcagcttctgcctctgcctcaagtcttgcttcttctgcaagtctttcagcctcttcttctgcttcaatagcttcaatctctgctattgtatatcctgcaagaagattatctgttccaatctgttctgctatagcctctgcttcttctccaaaacataagcactgtgtctgtacataaccttcgcagtttcctgaactaactttagtccattcctttccgaccatatcaacatctacaagtgtgttagtatataatcttcccacaacctgtgctgtctcttcgtcagaagtgtcataaacatcaagataaggatcagtaattgctactgccttgttcttgtatgttcctgtttcttcatacccagtcacaagaacctcttctgtattagctgaataagatgcaaccttaattcccgtgtcagtattctgtgttttctcataggtagttgccactgctggaagaaccggtgtcataaataacacaattgcagctcccacatagcaagcagctttgctacttctaagtttcatattatacttccctttccggcggcttatttagcttcgcctataaattgttacagaaatgttacaatttattacggaaatataatagcaaagttacagtaatttgtcaaatatgttaaaacccgctctatgagcgggtttgcgggtttgtttattaaattcattttgccaaaaatagtatatgaccatatatatagttggttatctacacacttctctgtctgacagcttcgtatgtaagaattgtacatgctattgccgcgttaagagattccacctctccctgcatcggaattcttataagtgtatctgcctgcttagtgatatcatctgtaagtccatttccctcattgcctattagaaatgcggttccttccctgtaatcttcaccaagatatgtattctttccgtcaagatgtgcagcatataccttaattccggcattctgacactgtgaaactgcatcgctaaaatcctgcacatatacaaatggcactctgaatatagaacccattgttgaccttattgtcttaggattatatatatccacagtattagaactcataacaactccggtaacacctgcaccttcacccatccttaatatagttcccagattacccggatcctgaagattctcaacaagaatcagcaacggattgtcggtaagcatatctgaaatactgctgtcattcattcttacaaccgccataatcccctgtggtgtctgtgtctgtgacattctgtcaaatacattatcggcgacaatctcaatactgtcagaagaaatcccctgcttcttaaccagctcatgcacatactcaggattgttaccatgaaatctttcagacatatatatcttcaccagcaaatctgccggcacctcagataccatgcggactccctctacaacatattctttattcttctttctttcccttgccttagaaagcaatgatataacatgctttacctgtgaactgctcgtactggttatcattatgaggttacctttctgccatgcattacttcgaaagtaacgcacttatattaaattcataatcattaatatccttagtcatggcaagtgcttcatcaatatcataatcaacaaacttaccatccttgtatgctacaagtctgttactctttccttcagcaagaagatcaacagcataagcacccataatagacgcatacattctgtccttacatgttggtgaaccaccacgctgcatgtatcctaaaatagtagctcttgtctcaatacctgttgcagcttcaattcttcttgccattcctgtagaatgtccgataccttcagcattaataataagatggtgtttcttgcccttctttcttccttctataatatgattaataagagtctgctcatcattatcatatctttccggaagaaggatatcctctgctccattggcaataccacaccacaatgcaatatatcctgcatttcttcccataacctcaataatactgcatctttcatgtgatgtagatgtatctcttatcttatcaatagcttccattgctgtattaacagcagtatcaaatccaatagtataatctgtacatgcaatatcaagatcaattgttcccggaagtccgatagtattaattccctgtgctgcaagcttctgtgcacctctgaaagaaccatctccaccgattacaactataccgtcaattccatgctttctgcatacttcagcacctctcttctgaccttcttcagtcatgaattccatgcatcgtgctgtatagaggactgttccaccacgctggataatatcagcaacgcttcgcttgtccatatcaattatctcatcattaagaagtccgttatagcccttctgaatacccttgaccttaagtcccttattcaaagcagttcttacaactgcacggatagcagcattcatgcctggagcatctccaccacttgttaatacgccgattgttttaatttcctttgccataacttcccctttcttatctcttaatattattttctgctttatgttaccacattataaaagaaaaatcttctttttttgataattttttaccaatgttaattaaaatttatgttgtagcaacatttttctcaccatatttactcttaagaatataaagcaggtctgatgtcaccttcacgcactgactctgtggaagcactattctctgtttttctgcagcacaatatattgtgactgtgtctttaccgtccgattctttgaaaatatcagcaagctcatccctgtgtgtctcatactcagcaagactgtcaaacctgagccacaatcttcttggaacactgtcaaagctcacaacactgtctgccgtaagtcttgcaggtttgtcggcatctgcctgtattcttcccgtaacaaatactttgttggtcgtatcaaaaagtcttttatatttttgataatttcttgcaaacatgattacctcaacgcttccaacaaaatcttctattgtaaggtacgccatctgctggcctgaaccggtagtaataaccttaatgttacttataaggccacctatcgtctgctttgaaccgttcataagctttgcctgtccggtttcctcatcaataagaaaatctgtacttctcgcagaaatatgcttctcccacataccagtatattcatccagcggatgtcctgttacatatacaccgagaacttctttttcacgttcaagcagatcctccttttcaaactcctgaatatcaggtactttcatctcaagactctgtttatcctcttcacttacgaaatcaaatagtgacatttgtcctgaaatagcatctttattctgcttaacagcactatcaatcattctctcatagacattcatcatgccccgtcttgtattaccaaatgtgtcaaatgcacctgcaagtataagatgttccactgttctcttattaattgcccctgccattcttgtaataaaatcctgcatggagtgaaaatcgccattattggttctttcttcaataatcgcagtaattgtaggtcttcccatactctttaccgcattaaatccaaaccttatattcttaccttcaacaccaaaatcagcaatcgatttattgacatcaacaggaagaatactaattcccatctctcttgctgcaagaatatattctgcgaccttgcttgttttatcagttacacttgatatcagccatgccatatactgtacaggaaaatgtactttcagatatgcagtctggtatgccacaaccgcatagcatgccgcatgtgatttgttaaatgcatattttgcaaagtccttcatctcatcatatatcttattggcagtctgttcacttatgccattcttaatacagcctggtactccgttagcctcattaccgtatacgaaattctgacgttcctgctccattacatcaagctttttcttagccattgctcttcgcacattatcactagcgccccacgaatatccggcaaggtcacggacaatctgcataacctgctcctgataaaccatacagccatatgtcggctctaagattggctctaactgcgggcattcataggttatgtttcccgcgttctcttttcctttaatatactgtggtatgaaatccattggtcccggtctgtaaagcgatataccagcaattaaatcctctaaacaatccggttttaactctttcatgaagtttttcattccgccactctctaactggaatatacctgcacatttgccctgacttatacattcaaatacagccttatcgttatatggtatattatccaccgaaaatgcagggtcaatctgctgttcacatttttcagtctgttggattacagttaagtttctaagacctaaaaagtcaaattttaacagtcccagatgttccagagtaggaccttcaaactgcgtaaccttaacattatctgctccaactgcaaccggaacatactctccaacatccttctgactgataagaacacctgaggcatgaactgaagcatgccttggcagtccttcaagtctctttgctttatctataagatctctcactgtctcatcagcttcatacaatgccttaaactcagcatttggcttaatgtccctgtctgcgtcaccattcattgcactgtcaatcgtaacaccaaccttctgtggtatcatcttcgcaatgttatcaaccatcgcatatggaagatccataacccttccgacatctttaataacggctcttgctgccatagttccaaatgtgattatctggcacacacattctttaccatatttttctataacataatcaataaccttctgtctgccttctggtgcaaagtccacgtcaatatcgggcatggacacacgctcaggattcagaaatcgttcgaatacaagattgtatttaacagggtcaagcgttgttattccaagacagtatgacacaagacttcctgccgccgagcctcgtccgggtccaaccggaatatcatgtgtcttggcataattaatgtaatcccacacaatcaggaaataatcgacatatcccattgaatagataactgacagctcgtaagaaagtctctggaatatatcattcgaatcctctgccctttttataacaacatcttttctgtctgcaactattgatgcttttgcctgctctataatatcttcaatacatacatctgcggtcttgtccggatatctctcctttaacccctcatagcataaagcattaagatacacccatgaattctttccatattcttctggcacatcaaacgctggcagctttgtaactccgaattctatctcaacattacatctttctgctatcttatgagtgttctcaactgcttccggtgcgtatttgaacaattccgccatctcttcctctgactttaaatagaactgtccaccctcatatcgcatcctgttttcatcagaaagcttcttacctgtctgtatacataataatatatcatgtgcatctacatcatctgcataagtataatgaacatcattcgtacataccagttcaattccggtctcattatgcatacgcataagctgtggattgacatagtgctgttctgctattccatgatcctgcaattcaagaaagaaatttccctttccgaatatatcctggagttcaagggcagcatctctggctgtctcatacatgcctcttgacagatatctctgcacctcacctgcaaggcacgcactcgtagcaataattccctcgtgatattcccttaacacttccttgtctactctcggcttatagtaaaagccttctgtaaacccttttgagactatcttcataagattctgatatccggtgttattctctgccagcaatacaaggtgattatatttatcctcgctctgtcctgcacctttatcaaaccttgaccccggagctacatacacctcacagccaagaacaggcttgattcctgccttcttagccgcctcgtaaaattcaataacaccatacatcacaccatggtcagttattgcaaggctgtccatgccaagttcctttgcccgtttagtaatctcttttatcttactggagccatccagcaatgaatattcagtatgcacatgcaaatgtgtaaaactcataacaactcctccctatgtcaaaaaatataacatattttcatttattaatcagcatttttatgatattctatatttaattattattgtaagggagttgtattatgttaatatctgatattcccgtaggcggaccaatttcaattgaaatatccatagataatgtaagctacgaaatgccttcctctgttgttgcatccaaaaatggctacattctcatagcgccttttacatcaaaaggtgctgtaatagatttttcttcttataaggatattttatttaatctttataccatagacccagcaacaaagaaccgtgtagtctggaagaatattaacatagaaactatcacttataaatcaaccggttttgcatctgcttactacaaaatctcgaccaatgtttatgccagtatagcctctgaatgcgacagaagatttaatcagcgcatttcaaccggggcttcgggacatatctcatcagataccacagaagctgatattccggtaacgttaattgatgtcagtgataaaggactttcattttcaaccagcaacgaactattatataactataataatacatatataacattttcagatcaggcaaacggaaagcagtttaactttcattttaaatgttttatcatacgcagccagttgtatggcgaacgctacatttatggatgtattatcccaactccgtcccgcgaatatcttacatatgtttttcttaaaaaaattgaatccagaatcagttctgctaaggaacagtctaaacagaccgctcttaaagatgctgctgacgttgcttcacaatctattgaaagcacttcgtcaggatatcattcacacatatctgaaaagaataagcgttgatataaggggcatatcacaatgtgatatgcccctttattattaatcatcttctttttctttagctgtatcatcagattcattatcgtctgaatgactgccaatattcttccatatatcgctttccggctcaccactaactgtcgatgaatagcttccatcttcattaaatgttacgctttctgccactttctctgatgttgagaataatgaagtatcaaccggttcaggtattccctttgcctctctgaatatcttcatgaattccttgcctgtgatagtctcatggtcatacagatatcttgcaagctgatccattacttctctgttctctcttataatctgcttagcctcttcataacatgacgcaataagcttctttacctcgtcatcaacctctgcctcagttgcctgtgcacagttcatagatgctcttccgctaagatattcatcttcaactgttgataatgcaacaagtccgaatctgtctgacataccatatcttgtaatcattgtcttggcaaggttagttgctttcttgatatcatcataagcaccattagtaactgaaccaaatacaacttcttctgcagcacgaccaccaacaagtgatataaggtctgtcataagttcatccttagtctcaagatgcttctcttcctctgggaagttaagcacataaccaagtgaaccattagtatgaggtataatagtaatcttctggaccggatcagaattattcttgatagctcttataagggcatgcccaatctcatggtaagcaacaacctgcttttccttcttgctaagaactctttccttcttctccttacctgctacaactgtatcaaaagcaccaagaaggtccttctgggtaacaacatttcttccattcttaactgccgcaatagcagcttcattaatgatattggcaaggtctgaaccaacaagaccgcttgttgccattgcaatctcatcaaaatcaactgtatcgtccataagcacatccttagaatgtaccttaagagtctcaattcttcccttcttatcaggtctgtcaacggtaattcttctgtcgagacgacctggtctaagtaaagccttatcaagtacttccggtctgttagttgctgcaagaatgaatattcccttagaagaatcaaaaccatccatctctgcaagtaactggttcaatgtctgctcacgctcgtcattgccaccgccatacttggaatctctgctcttaccaatagcatcaatctcatcaataaatataatacaaggagcctgcttagttgcttccttgaacaagtctcttactcgtgatgcgccaacacctacgaacatctcaacgaaatcagaacctgcgagtgagaagaaaggtacatctgcctcaccggctacagccttggcaagaagcgtcttacctgttccaggaggtcctactaaaagtgcacccttaggaagctttgcaccaatcttggcatatttctcagggtaatgtaagaaatcaacaatctctgtaagtgattccttagcttcatcctgacctgcaacatccttgaatgtaacacctgtctttttctggacatatactttggcgttgctctttccaacgcccattccgcccatcattccaccattcttagcaattcttctatatacaaatgcaaagattatatatatgaataaaaatggcagtacatatgcaagcagaaattctacaattgaagaactcgaatccggaatatatccttcaaactcaataccctttctcttaagaagtggtacaagagtatcatcattaacataccctgtataatatgtgtatgaaactcctgctatgccagactgtttctcctcttcaacaggtgtaataagaattctgtcctgctctaatgctactttctttaccttatcttcatcaatcatctgcatgaactggtcgtagcttatctccttgtatgtcgcattcctaaacatattgctaagaagcgtaagccctataaatgttacaactgccgctataataatgaatattataaggttaacattctttggcttcttattattattgttgttattacgattattgttgcggttatcgttattattataaccattgtcataaccgttgttgttataattatccatactcttctcctgatatgatactgtacttatcttaagcatttccaaataagtctgttttcattataaagaaggaaaaaatataaatcaaccaaaatctaagtgtttaataagatgtttatatttactttatattcttagtttttttctttaaactatggaaatttataatacagggctgtataatattgcatatttttttgattacacattcagattggaggaaaagatggctgttaaatatgtatttgtaacaggtggtgttgtttccggtttaggaaaaggtatcactgccgcatctttaggcagactgcttaaagcccgtggtttttctgtaaccatgcagaagtttgacccttatattaatattgatccaggtactatgaaccctatccagcacggagaagttttcgtaactgacgatggtgctgagacagaccttgaccttggtcactatgaaagatttattgatgaaagccttaataagaattctaatgtaactacaggtaaagtatactggtctgtattacagaaggaacgacgtggagatttcggtggaggcacagtccaggtaatccctcatattactaatgaaataaagagccgttttttcagagattattcaactgatgaaactaagattgcaattatagaagttggtggtactgtcggagatatcgaaagtcagcctttccttgaagcaatcagacaattccagcatgaagtcggacatgagaacgcaattcttattcatgtaacacttattccttatcttaaagcatctggtgagatgaagactaagccaactcaggcaagtgttaaggaacttcagggaatgggaatccgtcctgatattcttgtatgccgtaccgaacatccacttgaggctggtatcaaagataagatagcacttttctgtaatgtacctaagtctcatgtacttcagaacttagatgttgagattctttatgatgcacctcttgcgatggaagaagaacatcttgcacaggtagcatgtgaatgtttacaccttgactgtccagaaccagaccttgatgaatggagagcaatgtgcaaggcctggaagaatcctactaagaaggtaactgttgcattagttggtaaatatatccagcttcatgatgcttatataagcgttgttgaagcattaaagcatggcggtgtatataattcatgtgatgtaactatcaaatggattgattcagaaactgtaactcctgaaactgctgatgagcttctctctgacgtatctggcatattagttccaggtggattcggtgacagaggtacagaaggaaagattgaagctatccgttatgccagagaacataatattccattcttaggattgtgcctgggaatgcagctttcaattgttgaatttgcaagaaatgttataggctatgacgacgcacacagtgttgaacttaatcctaacacaactcaccctgttatacatcttatgccagaccaggaaggcattgatgatatcggcggtacattaagacttggttcttatccttgtgtacttgataaaacaagcaaggcttatgaactctatggcgaagagcttatacatgaacgtcacagacacagatatgaagttaataatgattacagaaaagttcttactgagaatggtatgatgctttcaggaatatctcctgacggaagaattgttgagatgatagaattaaagaatcacccatggtttattgccacacaggctcatccagagttaaagtcaagacctaatcgtccacatccattattcagaggcttcataacagcagcacttgaatatcagaataaaaaccattaattatattatatatgcataacaaaaaacatcacctgacgaatccgactttcgtatcaggtgatgttttttattgcttttgcttataaaattattatttattaagaccattaagaatcttcttaattctcttaacttcatcgtcttctaacttctgtgattcacaaatagaagcaaccatatcaacagcctttccattgaaccagaaatcggcttcttcctttaaaagctgtcttctatattcttcttctgaacgaagtggatgaatgaaagctgcctttcctttacggtatgtatcaacaaatctcttgtccttcaacttacctacgaaagtaacaactgttgttcttgcgtaatccttaccataatcgtctcttaactgatcaataagttcctgtacaggaatatcctgtggtgcttcccatataagcttcataattaatgcttcacatggacttaattcattaaaatgatttctgctcataaaccctccttaggctcttccatagatatacatattctatattatactgccattattaatatttttcaactgtataatgaatagtcggatatggatttcacaattgtattaccgataaactgaatccatcaaattccttttctacaatagtgaaattctggggaagtccgcacatatatgctttcattttccctttctctaatctataaactattttgtccaaaatgtcaagcacaccttgacctgtagccttgccataagcctcttttaatgtccatattctgaagaatctttgatcactatcgcactctttaatccattctgcttcagatatgtcaaagaagcgttttgccagattctgtctacctttgcgggctttttcaatatcaattcctaccggtctgtcgcctatcacgcacgctacataattagacgaatgtgaaatattgaaaaaaatttcacgatttgacaaaaaataaggttttccttgcgaattatatactatttcataatcaaagtacggattattcgcttcaatcaaagaaataatatccaccttctcatatagattttcatctgttttataatctctttctcctgtttttatagaccattttcctaccgcataattaagaagtaggcctgccgtcacggtttgcagcttattttcacgcattttcatcttatcagccttagttttcctgtattccggaataagcgaataagccttttcatataacttttcatctgctaatgcatctgtagttgtcacaaatatcatcataatcaatcaccatctatacacttattgtctgtgcatctgccatataacgctttgagaacacgaatactatatcacctgatttaatcaaggtatcaccattaggaactattgcattatcaccgcgtcttatcataactataagtgtatgccttgatatatcaagttcttttatcttgtgtccaacccacggatgatgttcacgcagttccacctgttttaggtttacatctacattaacatcacagtctcttgctccgattacaacacaatctccctcaaaaagcttcatatctccctttggcataagtgtctcaccatttcttaacactgctgcaagaataagtcctctcggaagactaagctcgcataccttcttttcattccagttgtggtccttagttataataagcttaataaacttaagttccttctccataaggtaatctgtagacttcttaataaggctgtactgctcaacgaaacctgcagataagatacctgttggaatagcgaccattccgacgccaagaaatgtaatgataatactaaacatttttccaagcactgtcacaggatagatatcgccgtaacctactgtaagaagtgttgataccgaccaccatattcctgaaaatgcattcttaaacacttccggctgtgcctcatgctctaaactgtacatgcacagtgatgatgctatgataagcatcacaatgatgaatacagaggataatatctggtccctttttcgccttattacctctgttataacatttaacgcatcataatatgaattgacacggaatatccttaggattcttataaccctgaacatacggaaagcaactgctcctgccgggaagaatacaggcagataatttggcaggaacgataaaaggtcaacaataccgcttcctgagaagatgtattttattctcgcaatacctgtacatttattaggatacagatattctgctgtccatacacgcagtatgtattcaattgtaaagccgataactgtaatccactctataacatctaacaccggctggtacggaattgactgttcaaatgtatcaaatatcgcaatgaacaggttgattataattgcagcagttatcgcaatatcaaatgtacggcttgcaacatcgcccgcatatccaatctggataatgtcaaatatacgttttttcttattattcaccgtatcccatcctcctacttaagcatataccacggaagcagcaatgctcttatatattttgcaaatggcacatatgccgttatgttaatgaataccggacataatataagacacgctataagaagcaccggtattattgaaatcattgcattggctctccttacaggtattgccacaagccatgcaaataaagtaactgctattacatacacagccatatgaagaatatctgctgtgcccttaagctgtcctgccaccgcaagtgttagaattgctgatactgcaaaaagtacacacgatatgaatgcatacaacggctttcctgcaacacggtacatacggggcagtgttataaatgttcctgaattcttatcaagataatattccacaattccaaaaagtccgcctatatatacaagaattataagcaatgcccttaacggaaactctcctgtcttatcttcaagctgtgtaccattatcctgtgcaccatctaacaccttaaaatcaattctgaatgtgtcatctccggatatgtattccctgtacccttttcttatctcttcctctgccttttctgcatgctttttaaatatgtctacagaattaacataattaactgcaacctccggcgagtacgccttaaacatagcagaaaagaatatctcatcagtcattgaactgacaaaatctgacctgcatataataagctctataatatctctgtagctgccactgtcaagcttatccttaagccctgtaccaactacgtagccacactctgttcttttattcattatatcctgttcaagcttttcctgcgattctgcttcatagaattgaactgaataatcgccattcataagataatctcttgtcattatggcaattttatcgtcatcttcaagcactattccaacccttacagcccccgcctccttaagagacgctgtatgcgtaattattaacgctgcaacaggcattgcaataagcaccacgacaatcacaggattctttaactgccttttaacgagcagatacagccagtataacaatctcttcattatctgtctctccttatcttaaccgccaatgcccctgccgcctgaaatataattatccacaaaacatttgtaataatggtactgatatccacagttcccttgattatctgacctgcaagtgtgaataatccgttagtcggaagatacattcctatagttctcacacccgacgcaagaaatgctgatgaaacaatacatccggatgcatacatgcacaccattccaatgacagatactgtgattacagaatacactgtgtcgtctacaactgagaatatgcagtttataaatgatagtgctgcatacacaagcaccacaattcccagtgtggaagcaatgaattctccaactgtcgaaaccgccagaacacctgatattgcaggaatccccagcctcattacattaattataataaaaagcacttcaaatatcattatatacacaatgccaactcctgcggttcttgcaattccggtatcaaatgctgatattcccgcacctttaaggctctttgcaagcgacctgctctcccccttcatattgccggcacatgttattgtgctaagtaaaagcagcatcacaattgctgtgcatacatagaactgtactgtactcaagccttctttaaccgatatatcccttgtcttaaagtatatgcttctgttaagtgcatacgaaagatatatgtcattaagcttattctcgtgtgttccacgcagccccctgtaattcttaagcacaccattgaacaaatcgtcaaatgtatatatccccgcttctgcagttgcaaggtcagaacctcctgccctcaccatctctcggaatatcatcgaagtattattaactccctctgactgacacacaacctcaacaggtgtattctcgcccgacataatatcacttatcatattctccggcacaataatagccataacataataattatttcttaaaccatctatagccttctgtctgtcagtatattcaaatgtacagacattcttaattgtgtctatctcactgacataattgaatgccatcttaatatatcgaaactccttattatctgccgaatcagagttttctgtatcatcataatcaggatacacaacagcaaccttcatcctcatgtcactgtcctgtgccgttgcaatgcctacgcatgtacttattgcaataacaagcactgccgtcactatcgtacccagaattatcttcggtatagataaaaatgcggatttaatctgcaattttaataattccagtttccttctcatctaatcccccaattaaatctatctgtgaataatctctaaaagttcattgcctgtaaccggatggtcaagttcattaagcttaccattctttaaaaggtacattctgtcagcaagccttaattcaccttcttcgtggcttgttataatgaccgtacctccgcttttcgtgtaagcagacagataattcataatatcctgtttacacacaatatccagtgaagcgcccggctcatctaatataagtacaggtggattcttagccagtgcacagcatatgcttaaacgcttcttcatgcctcctgacagcttatcaacacgtttgtcaagatattctgacactcctaacactgcaggaacaccgccctttaagtctgcgtccatgtttcttcctgtatcacagtaccagaatttaagattatcccttgccgacagcttctccataagtggattctcctgcggcacaaaaccaatatatttctgaaacaccaacgcatctgcaaatgcatctgtgccatctatcttaagacttcctccatctgccttaagacttcctgccagtatctccagaagagtagatttgccacagccgttggcaccgactatggcaatatactctccgctggcagcatgaaacgaagcgccgttaagcactgtcgttttcctgccatatgattttctaatattctccgcctctataaacatacatatatctccacattaattctgggctgctgtatcaaactggctgtaatacagcttgtgatagaatccgttcttagccagtaattcttcatgattaccctgctctataatatgtccgtctttcataacaagaataacatccgcagactggatagttgaaagtctgtgggctacgataaagcttgttcttccctccatcagctttgcaaatgcattctgtatctttatctctgttcttgtatcaatagaagatgtagcctcatcaagaataagcattggcggctttgcaagcataattcttgttatacataaaagctgcttctgtccctgtgaaagacttccgccatcctcgcctataactgtgtcgaatccattagacattctcttgatgaatccatatgaatgtgctgcctttgctgcggcaataatctcttcctctgtagcatccggcttacccataacaatattctctcttatagttcctgactttagccatgtatcctgaagaaccataccaaagccctgtcttaaagactttctggtcatctgtcttatatcagttcctgatacgtcaatgcttccgctgttaacatcataaaatctcataagaagattaataactgttgtttttccacaacccgtaggtccgacaatcgctattctctgtcccttcttgacatgaagattgaagttctcaataagcttcctgtcaggtacataggaaaagcatacatcattaagatcaactgttccgtcaacctcttcaacaatcctggcatctttagcatcaggaatctcagactcttcttcaataagttcaaatattctggctgcacatgcaagagcgttctgaagctctgtgacaacgcctgatatctcgttaaaaggtttagtatactggttggcataacttaagaagcttgataactggccaactgtgataccgccattgatagctgaaaatgcaccaacaatcgcaacgctcgcatatacaaggctgtttacgaatcttgttgacgggttagtaatagatgagaagaagattgcctttaaggaatacttctgaagtctttcattaatctcatcaaattttcttaccgcctcatcttcatagccgtaagccttaactaccttctgtccaccaatcatttcatcaataagtgctgtctgctcacctcttgtctcagactgaagtttgaacatgctgaaggtcttcctggcaataaagcttgcaactataaatgaaagtggcgtgataacaacaactgcaagtgtaatcttagcattaattgtaatcatgaatataagtgttccaagtatagtcatgacacctgtaaagaactgtgtgaatcccataagcagaccatctgcaaactggtcaacatcagcaattacacgactcacaatctcaccatatgaatgtccgtcaatgtattttagtggaagaacctgaattttctctatagcctcatttctaatgtctctggttacttcatatgtgattctgttgttacatatgttcataagccactgtgaaagtgctgtaattccaacaaatattccgatttgaataagtatattcacaatctttgcaaaatccacattatccacaccgataatgcagtcaattccacgtccgacaaggattggcacataaagtgttgttgcaactgttactgccgccataataagcgataatattatgaaaaagctgtgcttcttaattcttttaaggagttttacaaatgttgatttattcttcttcattatgctacacccccttctgaatctgctttcttaaactgtgattcatatatctccttataaacctcacaatttgcaagaagctcgtcatgtgttcccattcctgcaacctgtccgtcatctaatacgataatgagatcagcatacataagtgatgccgctctctgtgaaactatgaacactgtaggagaattgttcattccccttatagcttttctaagtgctgcatcagttgcaaaatcaagggctgatgcactgtcgtcgagaataagcacatccggctttcttacgattgctcttgcaattgtaagtctctgtctctgtcctcctgaaaggttctttccaccctgttcaataggatagtcaagacggccttccttagaatctacgaattccttagactgtgaaatctcaagtgcttcatctatctgctcatcagtagcacccttctttcccatccacatattctctcttatagtacctttaaaaagtactgctttctgcataacgataccgactttatttcttaaggtttctatatcgtactctttaacattgacaccatcgacaattacttcaccctgtgtagcgtcatacagtctcgggataagattaacaagacttgatttacctgaacctgtaccgccgataacaccgattgtctggcctttcatagccttgaaattaattccttcaactgaaggtgcacctgaaccgctgtaggtaagtgaaacatttttaaattcaacgctcggtgtctcttctttagcatctacattcttaacatcaccatctgacattcctgattttacctcgaatacagactcgattctgcctgcacatgcaagtgctttagttattgtaatgataagattagcaagcttgataagctcaactaatatctgtgacatataattgtaaagtgcaacaacctgtccctgtgtaagcgcaccagcgttaactcttactccgccaatccagataagtgcaattattgatacatttacaacaacataagtaagcggattcataagtcctgatatcttaccaacgaatttctgcaatctgttaaggctttcgttatcgtttttgaaacgcttaacctcatcctgttccttattgaatgccctgataactctcacaccggtaaggttctctcttgttattccaagaatcttatcaagtcctgactgtacattcttgtacataggccttgttgcaagcatgataccgaatacgataagtgcaagtaccgggattgccgcaacgaatacaagtgctgccttcacatcaatagtgaatgccataatcatcgcaccaaatacgataaatggtgaacgaaggaacagtcgcagtaccatgttaataccattctgtacctggttaatatcacttgtcattcttgttacaagtgtcgatgtaccaagtgtatccatctctgtgaatgagaatgtctggatatgtgcaaataaactgtgtctcattccggttgctgctccaactgcagccttggcactgaaatactgtgctgttatggcacatacaagtcctatgattgcaagcagtataagcataagacacatctgcataatgtatcccttatccgcattaacaatacccttatcgataactgatgatactaccagcggcacaaacagctcaaatattgcttcgagcatcttaaaaagcggtgccagaacacattccttcttgtaatccttaaggaatctcataatcattttcataagaaaacttcctccgttaattcagtgacactaaagcatccataagaaactcatacgaatagcatctcttagtgccaaaatattctctataaacttcataattgtaatatgaatgttcaaactgtcttgaatacaaatgtgctatatccacgcgcattgtaaaatcaggcatacatccggacgcatgattagctgctgccataatgtccactgcaagtatgccaataactgcattcttggctttaagcagcacatcataatcattgactgcatcaagcatatatctatatacatagtacattgcaagctgctcatattcatgtgcaaatgcttcgcttcccgcatggtaatctttcattgccgctacaagctcagaatcatccgccagcccgtcaaggaactgtcttactcttgccacatgaatattccagtcgggattgattacctccattcctttaaaatcgtcaaagaaatgccgcagtccctttataagccttgtgccatatgatttgtgcacctcaggctttgacttaactatatctccgtcctgcagcttatcaggtaacactgtgtccctgctttttagcttgtcaagcagtttctctctgtaatcaggtccacaaaacctttttgcaacaccagctataagctcgtccctttcagcgtcaagatgcttctggatacgctttgcataattaagatagagcatcagtctctcaaatatacttatatccctgtctgatattattccaaatgccactattcttgcctgccgaagatgcatatatgtatatgcatctatatcattaggctccagagtaaggctgttatcctcaaccgtatcaaatgtaagttcatctttatatgaaaacatcagctcaccagccgtcttacacgagggtgctatgccaatctctcttatattgccataatcattaataaatcttggaaactctgcacatgtttcacacagcttatcctctccaagttctatatataaatcgcacagattatcatcattaagaaaaggacatcgtcctccttctttcagtgtaaatgtacattctccgtcctgggatggtaccattacactcttcaggcgctttccaaaagcgcctttaactgttttataatatttgtaagaattcttatcaacatcgacatcccacccggcacagcatgtatctgtacaggctcctgcaatgcatcggaaatctttataataatgtggtgtcattactttcattttattatctcccgcatataaaccggcatattaagcgcatctgttaactgcgcaaaaattgtctgccacaccttattagtgcagcagacacatttacatgtacatattattataattactgttctttttcttgtccacaatatacttatacactgtgacacacgcaagaataatcataagtccctctgctaccatgtatgtatagaacagatatggctgtcttaacgctgacacaagaagtggtgaactcattgcaaaatcatacattccagcatcgcctatatacttagacataacaactgtactcatgattgttatattaggaaaagacatattgccaagcacaagtgccacaaccagcacagcattgcgtattaagaaaaatgtcctgctcaccttagctttactaagacagctcataacaatgcctcctattatacatacaagaaataaaagaaacatcatatacatctcagaagctgcaattgcagatacttccgttgccgcagtctcatatcctgtaagcagtgcaaagaacccaaatatagagcggcctcccataatacatgccgccacaacaaataataatagtaataaattccttctgtttaacttcctgttatccataattcctccatttgtattattatcgcaattctggaggaagatttcaagtaatttatatgaacttgctgcgccacttaattgcctcatccctatacgcaattgctgtctccataagctcattgtattgcgccttcgcactttctattgttgcctcaagctgcgcaattacctgcttagactgcgcctgttgctgcatatatgtattaagctgtatctcatattcatgaattttttcttcattttgtttcaggctgcctgtgtcctgacacggtatgaattttccatctgccgtaatctcatagaaattatctacatataaaaatgctcttccctgcattccaaacacttcatacatatcaacattttcacaatccacaggaatatttagactgtcaccttcttccagtgggcagacagccctcagcgacagtctgtccgtaagcgggtttgtcaccatataaaacagcaataacctgtctttatttactacaagctgtggacagtgcatatctgggttctcgctgcttttcacacgaaaaagtgcttcgttgttcatcacatttttaacaagaatatctccgttctggttctgatatgcataatatattgtgtctcccagcaccacatctgaaagtccgtccagaaagtctgacgcaagcattatcgggcgctctataccgtctatgtacgccgttctcaaaaatatatatcgtgatatgctatagattataagccgtctgtcgctgcctgctgtgtatacatttgccataaaaggacactcccgtttttacattattatatgttcacgcgaatgtagatagaacatataatgtagtaaagaaacgaagaaggaaaagataatggctaaatgtaaatgcagcaaatgtggttctacccgcattgtaagcaatattgtgcagaacatgcctaatggctgctttgatgtatgcacgaacccgatatgcggttcacccgatgaactcagtattcttgcccctcttatctatgacgagataggtattaatctgtgtaccacattcgctgtcggcacagatatttcaacgacttatccaacagctaccaacgcatcagtcagtgttatagatataacctacacttatggtgatgaaaatgttgaaatcacccagatagccggaaggcctaactgctactctgtgaaacttaccaaccttactgtaacatttgcagtaacactttatgatgagtcatgcagggcattagcaactcttaccccaacggcagtctaccttcctaactcaactactgctgcaacttatgatgaagacaccaatccgacatctgtgacccttgaaatattcgctccttacggagtttcctacaactcaaataacgcaactccacctgtttatacgcctgcacttaacagtataggtttcttatcatctgacaatgttgtaacccaggggctcaacctctatgcaatacctaagcttttaggtcttgatactacagatgatgaggttactgtaggtcttactctcatcttacagagcctttacttctgtggataccgcgtaacaagtgccggcagaatctcaacgcctaagggcagcattgtttccggtgaagaatcagactgcatcaagttcgtttgcggcaacctcttagacagagccatcaaacctctcgatttaagcccaccttcatgtgaaggtaacttaaaaaaagactgcaagaagccttgcatgaatgactgcaccgacactcttaacactaacagcacagcctgccagaacgcttgtaacaatagcaatagcagccagacttcctctggtgcttgcgccggatcttgcaataacatatgcagcaagactaactgataacttcaatctgtgggaacagacgcctgcctggcggctgtttccatgtacatattttcttccatcgcaaatattttaattgctaatttccctactatgtgtgtataattaatgaaatatattatattgaactgttgtatacacagtcgcaaagtgaatatatttagctttggatgctctttggagcagccggcacttagtaaaccgcaagcggcttttgaagaaagcctaattgcggtgaacttagtgtccgttgctagcgacaagaagcgaaagcgtgctccacagctaaatatattcgctttgcagcgtccgtatacaccacagttcgcatggaaaggagttactaatgaattttaaaaagtacaggtcgagattccttttggtttttgcgaccctcactctcttgttctcttctgttcttcttacttcatgtcagggcaagaagattaagaacacagtattttctgtagatgatcttgcaggcaagactattggtgttcagttaggaacaactggtgatactctcgtaagtgattacgaaactgacggttcaggcacaaccgtatcaagatacaacaaaggttctgatgctatacaggctttaaagcagggtaaagctgatgctgttgttattgatgaacagcctgccttagcatttgttaaagctaatccagaccttacaattctcgaagaagaatttgcaaatgaggattatgcaatctgtgttgcaaagggcagttcccttactgcaaagctcaatgaggctattgaagtacttatggcagatggaactatccagaagcttattgacgattatgttggcgataatgctacattttcaggttacaagtctccggaaggtgtaagccgtactaatggaactcttgttatggctacaaatgcttacttcaagccatacgagtactatgaaggtggctctattatcggtattgacgctgatattgcacaggctattgctgattacctcggcatgaatttaaagattgaggatatggaattcgattcaattattactgctgtatcttctggtaaagccgattttggtatggctggtataacagttacagatgagcgtaagaaaaatatcgatttcacaactacttatacaacttctaagcaggttattattgtccgtgacgacaatgcttctgcatcaggcatgagttttgctgagaagttcaagacagacttcattaaagaagcaagatacacttatcttctaaagggtctgctaaacacagtaattattgcattctttgcagcacttatgggtgttgttattggtttccttattgcagttgtccgttctaaccatgataagacaggacacatgaagattcttaacttcatttgcaacatttatcttactgtaatcagaggaacaccaactatggtacagctgcttattatctattatgtaatattcagctctgtacatattgacaagcttattgttgcaatacttgcatttggtatcaactcaggtgcttatgttgccgaaatattccgttcaggtattatgtctattgataacggacagtttgaagcagcacgaagccttggtctttcttataaaacaactatgataagtgttattcttcctcaggcattcaagaatgttctcccagcacttgctaatgagttcattgttctgttaaaggaaacatctatcagcggttatatcggtcttaacgaccttacaagaggcggcgatattatccgaagcataacttatgatccaatgcttccacttattggtgttgccatcatctaccttgtaatggttatgggactttcacagcttgttaagaaacttgagaggaggttaagaaacaatgagcgataatactaacgaaatcatacttgaagttaaggatttgaagaaatcttttggcgaccatgttgtattagaatctatcaatacaacagtccgcaaaggagaggttattgcaattatcggaccatccggctgcggtaaatcaacatttttgcgttcacttaaccttcttgaaactcctacagaaggtcatgtattattccatgagcaggatcttacagataagagtgtaaatgtggatgaattaagagagaagattggaatggtgttccagcattttaaccttttccctaatatgactataagaagaaatataacacttgctcctactaagctgggacttatgagcaaggaggacgctgataagaaagctgatgagcttcttgcaagagtgggactttctgacaaagccgatgcttatcctaaccagttaagtggtggtcagaagcagagagttgctatcgcaagggcactcgcaatgaatcctgagataatgcttttcgacgagccgacatccgcacttgatcctgaaatggttggtgaggttctcgcaatcatgaaggaacttgctgcatcaggaatgacaatgattgtcgtaactcatgagatgggatttgcaaaagaagttgccaacagatgcatgttcttctacgatggtgtcatcaatgaagagggggctcctgaagaattctttggcaatcctaagagtgagcgattgaaggatttcttgtcgaaggtgctttaattagtacagtgagggagtcgcttgggtgtatgtttatattgcatgctctcatggattcctcgcctagtgaaagtaaataacgccatctgcaaagtctattactatgcatgaaatcaaacgcgcttagcttgaacgagatttcatgcacataccttctgcagatggcgttattaacattcacacggctcgtcataaatcgagcacacaacataaacatacacccaagcgacaccaccccgctactaagcagccaagccttccacggctggtgcaaacgtatcttatcaacagaggacatcacgcacttcaccagcccccactcagaatgcaatgccgcaggcgagcattcgtccggaggctgactacttggtgaagaagaagtcagccgtacagtatgctgtgggagggcgtgtggtgtccttaggcagatgccctcccacagcacactgtacggcgtccggactatcaagcctccttcgagtagtcaaccttcagaagacacagtcccttcgccggcgcagttgcacctgcaaggcttctgtttctctcctctaaaagttcatacatactctctggtgttctctttccctgtccaacttcaagaagtgtaccacttaagattcttaccatgtactgcaagaatccgcttccatgatatgtaagattaaggaatgaaccctttaaagaaacatctatcgaataaatctcacggactgtcgatttcttcatcttgggattaccacaaaatgatgcaaaatcatgttctccagtaagtatgtctgctgccctcttcatggcatcaacatccagcttaccatcaattatattgacatattttctgttaaatacaggcttcttatccccaacataacatgtatagcaataagttttcccttgtgcattgtaacggctgtgaaatctgtcagatgcaacacggacctcctgcacacagatatcttctggaagatatctgttcatataatcgcatatctcttcttccttcatcttagtttccatatgcgcattggctaccattccctttgcatgcactccggcatctgttcttcctgcacctataacctcaacctcagttcctgtcatggcagaaagcactgattctaactttccctgaattgtcatatcagtagtcggctgatgttcccagccataataccttgtaccatcataagtaattatcatcttataattcttcattcatatctcccattcattcttctgatttgaagccatataatttcatacaattaacatctgtaatctcatctcgcaaaataatgtccataagcacattttctcatcttgccagattctgcttcataccatcgagaaaatcatatatttcatccataaacaccttgccatagcgctcatatttattctcaccgacaccgcttactgacagcatttcttcctcattaaacggaactttaagacacatatctataagtgtcctgtctgaaaatattacatatggcggaacacctactgaaacagctatctgttttcttaactcacgcagtctgttaaacaacataacacctctgtcattaagtgcatcctccggcttctttgacttgggcgttgcatatgctgactttgcagcagcggcagaacgcttcattctgtctgccaccattgcagcattccttgatacaggtgcactgaaacggtttcccggatacatataagcctcatctgcttcccgttctgcctcatcaataacgcagttagaacagttatggcagttgtatcttccaccctttggattgtctggtctttctccaaaatatttaagtatatactctcttaaacagcctgatgtcttgcagtaatcgaccattgcattaagccttcttttatcaagaatcataagccgtgcctgttcttctgcatccatatcaggattaggctctctgtgttctatgaaaaacttatttatcataatatcctgtggagaatacaacagtacgcattctgaatcctctccatctcttccggcacgtccagcctcctgataataattctctatacactgcggcatattataatgaattacaaatcttacatttgacttgtcaattcccattccaaatgcattagttgcaacaacaactggcttgatatcatatataaatgaatcctgattttcttttctttcttctgctgagagacccgcatgatacttagtcacagaaagtccgttagcattaagcatgtcatagactttttcaacattttttcttgtagcacagtatataatcccactatcctgtctgtggcttacaaggtaatcaagtatatatgaatccttgtccttaatatgcttgaccttgaatgtcagattgcttctgtcaaaacctgtcgtaagtattacaggtctttcgagtgaaagaatctgcaatatatcatctcttactttgcttgtcgctgtagctgtaaacgcgcttattataggacgccttgccagtttcttaacaaaagacaatatattcagataacttggtctgaaatcctgcccccactgtgatatacagtgagcttcatctacagtaatcatagatatctctacatgcgtggcaaaatcaagaaagccccaggtttccagcctttcaggtgcaacatatataattttataccgtccctgctttgcaaatgcgagtgccttagctatctgattatctgtaagagaactgttaatataagctgcatgtacacctgcctgattaagtgctccaacctgatccttcattagcgatataagtggagatacaacaagagtaatgccggacattaacaatgccggcacctgataacataatgattttcccgcacctgtaggcataattcctaacacatcctgccctgcaagaatagcatcaactaacttttcctgacccggacgaaatgaatcatacccaaaataatgctttaaaatcccgtatttatccatatatcactctcttttcaatcttctcttactttcatacattctcttatctgctctgcttcttgtatcttcaaagttcttatctgtctttatatcatattcagcataaccacatgcaatctgcacattaaggtctttgattccaagttcttcttcagtatacttttcaagttcccttagctgctttacatgtcttccaatatcaaagcttttttgcttctgattaattacagtacagaattcatccccacctatacgataacatttgccatgtctgccaaatatctctttaataattctggctgatgcctgtatataggcatctcctgctgcatgccccagattatcattacaccacttaaggttattaaggtcaaatgtcactatagaatacccttcataatcagaagtttcctgttcccactcttcaaatgcaaagcgattataaacccctgtcatagtatcagttacagccatctctttgtagaaatctgccttctggccttctttaatcttctcaaatgcttctgatatgctctcataaccaagcacaataataaatataagaatacccagttttcctataagatctgtctgctgcattcccttataatatgcaataagatcaacaatcatagaaattccaagtgcagccgcacctataatattagactttactttcctgtcaaagcctttaacccatactcttttaataagaactgtacagaaatatacaagtgacataacaagcatcatatgtataatgtacacgctgttcttaaactcccacacacctgtcatatgacatacaagcagtattacagctgttgcagcatatatggcgcacaagatattattcgcagcacttttccctatctggaaaaaattcttctctgcctgcataaaaggaataggtatcatcattagcagtacataccctatcagtgaacctatcttcctattctccacaagaattgttgcaatatcagtctcattaagagcccatgcacctataatcattgcaaatataccaaaataaaacagtgcttgtgtctgtgcaatcttctttctgcagaaaatccataatataatcatggcaaatccaactattattataaacgaactaagtactgctgatggcagcgatttcgcaataagctcttttataagttttgtctcatcgccatattcaaatgttgttcctcttatcttatgaccagcatatacattagtaagccttacaattatatctgttgtatatggcggaatgttcacaatcgtataattagttccggtggttgttccatatacagacctatgtgcttttatataatatataagtcttccacctgcatatacttctacttcctgatgcctgcttacaaatgccagtgcattattatttcctgcacctgctctaatcttcacatgatattcaattgtgtcatctccaatatatcttgtatcctctggtttaactacgacactcgttcttttatctgccggtgtcaccttatctacagtgctgaatataaatcctgaagccataaaaagcagaaatcctaataaaaatatacagtaaaaaatcctgttaactaatttaattcttttcataaaaaaagcctttcagccgtactatagtgttatccgtaataaatctaaccctataatacagtagaatggctttattttcaaatgattttttgttgttctgtattttgtacactattcgcaaagttttaaaactgcatagcactacaagttactattatatacttttagcaagttcagttggattctctgaaaacttcaaagctacatcccttgaaataactcttgtcttaacaagattagcaagcgaatagttcattgtgtgcatacctgtctgcatatttgactgaagaacggtctgaatctgattagtcttcttctctttaataagattagatactgctgtattattaagcataatctctgttgcagcaattcgtccttcctgctctgcacgaggtacaagtgtctgtgttacaactccagttaatacagatgcaagctgtattataagtgcagactgtgcctcaatagggcatgcactgattatacgctcaactgtctgtgtagcgcttcttgtatgaagtgttgataatacaagatgtcctgtttcagcagctgtaattgctgcattgatagtctcataatctctcatctctcccacaagaataacatccggatcttcacgaagtgctgaacgaagtgctgtcgcaaaatcaggtacatctcttcctacctgtctctgatgtatcatagatttcttaaacccatatacatactctataggatcttctactgttataatatgtcttgacatattgttgttaatataatcaatcatagctgcaagtgttgtagacttaccacttcctgtaggacctgttacaagaataagaccagaccttttctcaacaagcttagaaaaaagttttcctgaatgtcccaattcttcaaacgacggtataacagaatcaagaagacggatacttgctgcaagatttcttctctgatgatatatattaattcttaatcgtccaccagactcatcagtagatgccacgtcaatatcttttcctgcctgaacattctgtatatcttcatcaccaagaattgagaatatcatctcttctgtttcttctatcgaaggtgttatatcaagaagctcaagttcaccatattttcttactgcaaccgcttctcctgcagtaatatgcagatctgaacacctgttatctcttgcgtatttaattaattcttttaattccatgttcccctcccatacattttgttcattagtatgaaccacaataaaatactaccataataaaaatgcatattcaatcacacttttatcccatttttcttacatatatcattaaggcagcatctttcacagtgtggcgtagtacgcgccgtacatacctctcttccgtggtctacaaaccggtggcataatccacttccttcttctggcgggactatcttccacaatgccatctcaaccttcttaggctctttctcgtcttttacaagacctattctgttacaaagccttatacagtgtgtatctgtaacaattgccggctttccgaacacatcacccataataagattggcactcttccttccaactccaggaagctttaataattcttccatgctgtcaggaactttatcattatactgttcatgaagcatgcgcatacatgcacatatatcccttgccttgctttttccaagaccgcaaggtcttataatcttttcaatctcttctggagatgctgcagcaagtgatgctatatcaggatatttttcatacagtcccttaaccacaacatttactcttgcatcagtgcattgtgccgcaagtcttacgcttacaagcagtttccaggcatcatcgtaatcaagactgcactccgaatccggatattctgcctttaatcttcttataacctctaaaacaagttctttcttagtcatagattacgcatctttcttcttataattagcaattccgaatattgcaagaagcaatacacacgcaaatatcatccagccaacaagataacctgttccccttggtttaaatgtatcataataacccttaaggtatacaaccactataatagccggaagtatataactcatatagaatcttaaccattcaggaagcttaggaccttttccttcattagcttcttttctgaagccttcccagccccagccgttcttcttggtacagaataatacaaatatcatgcttccaagaggaagcagattatatgaaacaaggaaatcctccagatccataattgaacttcccggaccaataggctggaaagctgcaagcttgttaaagcctaatacagcaggaagtgaaagcagtatcatgaatataacattacctgcaacaacctttttccttgaaaatcccttaaggtcaatataaaaagcaataatgttctcaaatacagcaattacagttgataatgctgcaaatgacatgaatacaaagaatgctgttccccatattcttcctcccgccatatgattaaatatgttaggcagtgttataaataaaagtgatggaccggcacccggagcaacaccatatgcaaagcatgcaggaataattatgaatcctgccataagagcaacaaatgtatcaatcagaatgatattaacagcctctccacctattgttctgtctttctttaagtagcttccgaatatctccattgcgccaatgcctacactaagtgtaaagaatgcatgtgtcatggcatcaaatataaccggccctaaacctcttgatttaatagcatcaagattaggcaccatatagaatttaacaccttctgatgcattaggaagtacaagtgaatgaactgccagtaccacaataaggataagaagaagtaacatcataaccttagtaatcttctcaacgcccttctgtaatcctaatacacatacaccaaacgaaagtaaaactgcaacaatcatccagattgtcattgtaccaggctgtgaaagcatagttccaaatgctcctgaaacctcatctggctctaaacctgctaacgaacctcttgcctcacgccatgcataataaagcatccatcctgcaaccatagtatagaaagccattaatacgtagcttcctactaccgatacccatttgaaatgatgccatttacttcccttagtctccagttcttcaaatgcccttgcagcacctttaccgcttcctcgtcctactgtgaactccgcacacataataggaaatccaagaattgcaagaaatacaagatagataagcacgaatgccgcaccaccattttccccgcatatgtatggaaatttccacacattaccaagtcccaccgcacagccagcagacactaagataaagccgagtcgcgagccgaatttttctctctctttcaaaataaaacctccatagttaatatatttacattaattaagattgtatcatatattactatattttcacagccaattatttcatactctcactgacttctgatgtaataatctgaccgccctgttcattccattcttttacaaatgtatcgaagtaagatatatcttcttctccgcttataatctttaaatatgcctctttttctttagccttaagtctccaccaatggctcttcattgtgtctgtggtcttaaaataaagcgagtcaactacctttatattatcctgtgcaataagactgcatgccttaattcttgacatatacgctgcccattgcgtacttgttttgttagcattcttaatatattcactgcatgcatcataaaatgaacgctcaagaagttccagactgtcaggattctttcttcctgaaattgtggcatctatattcctgtaacatattgaaagtgcattattataatcaacatttattgataaaggtcttgccgtaggttcaacattaagctgatagtaattcttgaattcttctgagtctgtacagtcaaatcttactttatcaaacataacgcttatcatctttgctgcaatctcaggatgttcatatccctttcttacgacaacatatttgtaacacgggttctggctgtgataactcgttgttccatccgaatccgttgctattaaatatggctgccagttcgcatccggatttttgcttactgcattggcaagcggattattcggtgcccaccatggtccaaaaaacgagccacacagaccattctctataagctcacatatattggttgatgttctcagaagaaaatcattatctataaccccctgattatacagactgtttatatacgaaagtgcttcttttgcctcatctgtaaccgaaccatatacaatctcaccatcatcgttcattatccactgctttggatacgctccaaagcaggcaaatattatatccagcagaaattcactgctgtaaccacattcacctgtcacatctgtatccactgcaagccccactgtattaggttttccggacgcatcctcgccattatttccagggtcttctgatataaaatgcttcactatattaacaacatcatcaatagtgtgtggctctgacaatccgagcttatccatccagtcttttcttaaccacacaagattaggtccatctgttatattagtctccggcagtgccattatctttccatcgtatgtaaccatatccttaagtgaatcgccatagctttcatacatttttcttattctgtcacttatacagttattgtagctttctgtaaggtcctctataagtcctgctcccactaactgttcaacctcatcctgacttgatacaaccatgatatccggcaggcttcccattgagattgccatagaaacgttagtgtcatactggctgtcgtttgcttcaaatgcatcaacattctgcacattaatcacagacttaatatagcgtgtgtacgcattatctgtatacgtgtcattctccggcatattggaattattaacacttgtcatctttccaagtgtatattctatagtctcggggtaagcaccgaatggcgttgtcctcgcttcttccattctcgcattgtattcttcattatcattagacgcaaaaccagccgggcttttacacccggctaatataagcattattcctgtgacaccaaatgccacacttttttttaatgtttgctttaatctattcatatatctaacccttcactgcacctgtcatgctttcattataacacctttgcattatcataaacaaggctgcaattggaattgatataagaactgctcctgctgcaaatcttgtgtaccatacatcaacatactccttttcaagcatctgccacaagccgattgctactgtataatacttcgcatttgccctgcagattactcttgcaaatatgaaatctacccaaggtgctatgaatgatgtaagtattgtatacactataattggtttactgagaggtattgttatcttggtaaatacctgccacttcgttgctccatctatcatagcagcctcatctattgtcttagggatagtatcaaagaatccctttgcaatgtaaaactgtattcctgatgatgctgaatatacaagcacaagtgcaactcttatcattgctccttctgaaagtcctactgctttaagtatataatatacagcaaccatcgccataaatgcagggaaaagtccaagtatcattgcaatattcatcattgcttttctcatcttaaacttaagccgtgacatacagtaagcaactgacagaacaaaaaatgtagatataatacacgagaatactgctattatcagtgtattggtaaacattcgtggaaaattaagtattcctgtatctgtaaaaagctttacataattatcaagtgaatactgctttgggaagaaggagcttgtataagcacccttctgagccctgaagcttgtgaggagtatccagaaaagaggacttacccacactatcgctaatattgtaagcactgtatgtgccagtatatttttaatagtctttttctttttcactggaatccctcctcatctttatacgctttcgttcttctgtatacaagcagtgaaccaatcgctaagaatatgaatgtcataataccgataacagcaccaagattataatactgataatctattgtcatcttgtacagccatgttaccagaaggtctgtctttcctgccgttgcacctgccataacaggatctcccttagtcagcagataaacaatattaaagttattaatattagcagtaaatgtagtgataagatatggtgccgttacaaataacatatatggcattgttatcttaatgaacttgacaaatccattagctccatctacatctgctgcctcatacagttccataggtatattctgtaatatacctgtaacctgcagaatagtatatggaatacctatccacagattgaccacgattactgtgattcttgcccaagtcgcatttgtaaagaatggcagtgattttgttatccagcctgcattctttaaaacaacatttataattccatcctgtgccagcatgcttctgacaataagaagtgaaacaaactgtggaattgcgattgaaagtataaatataaatctccagaaagccttgaatttcgtaccctttctgttgataagcagtgcaacaagtattccgaatatgtaattaagaaatgttgcaaatactgcccacactatagtccagccaaatactgaccagaaggactgtcctatcatgcttcctgaatcgaatatctgcttgaaattctcaagtcctacccagtcgaaaagcaccagatgattgttaaccttactataattagtaaatgccatacttatcatgaaaataagtggaagtattgtaaatataagcacacctgataccggaagtgtaagcagcagcttatgaaggttctcattaaacagcgacttcacatcttctgcaaatgtgtttatatgctttcctttttcctttaacagctccagcttatatgagcttttcacagcacccgctgcaactattatgtaagctataatcatgaatattgttgctattccatacagaagtataagaagtgaattatcacctgcaacatactcatatattccaagcttctcattccagacctcctgctgcggtctgcttccaagacctggaagcatcgcaaggcagttaattcccttcataatcataaagcatacaaaggctgcttctatagctatatacataattccctttataatctgctttcctacaagattaccaagtcctggaatcagaatgcttaacttcgtaaatatatttccttttctaaatgattcagtgaacttaactgccattatgcgctactcctttcagcatttaattgctatcaattattttgcaattgaagtattaatctgcttatagaaatcctgtgtcttagctgctgcattatctgctgttatttcaccatttacaattgccttagcaaagttctgtgcaggtgtccagtaatcattcatgcctgttactgttggctggattactgatgtcttgttaaatgtatcattctgtgctgttacaagtgcatccttctttacttcatcagttgcaagaagctctgtattacaaggaataacacctcttaattcatagtgcttcttctgtgcatccttgcttccaagatactttgcaagtgcaactgctacctgctgatacttgcagttaggattaactgcgattgccttagaacctgcaaatgctaacatctgcttgtcttttccaccaatctttactgtaggaagtgaaactgctccaaatttgtctccaagaatctctttaacactcttataatcccatgatcctgagaagtaagctccaactgaaccatctcttaaaccagcgataccaacgccctgaaggtcattgacaaagttaggattatttacaagtgaaaccattgcctgtgttgcctgtgttcccttatctcctgagatatcaacaccggctgaattatcttttccgtcttttccaaaatatgtacatccattagcaaggaagaatgatgacatataccagccctctgtaatattgaaagctaccttatccttctgaagcattttatcaaggctctttacatcactgtctgtgaatttgctcttgtcatagtacataaaccatgtgttagttgtgaatggtactccgtatacagctccatctactgatactgaatccacaattgcatctgagttagttttcttaacataatctgctgtctctccaccaagctttgcaatagcattagcatcaacaagtgtctgaagctggtcgttagcaaagaagtatacatctcctgaattctccggatcctgtggaactatctttcctgcgtcctgctctgagcatacaccgtattcaaatgttaaatcccagtcaggatgctctgaattgaactggtcacacattgtctgcagccatttgccgttctcatctgcctgatcttctgcacagccccataccttgattgtagctgtgattttttcctcacctgctgctgtgtcatcctttttagcattgccacaacctacaaaaagtgacccacacattgttgctgccatcactgcagctgctaatctcttaaacttcataaaaaaccctccttaataattatccgagacagctttgattactgtcctcttttgataatctaattatattaaggagggattaatattaaaatataagatattttagaaacatatcagttttttgtgttgtatggttttgccgggaattttattgttattgttgttccctcatcaggtatgctctgcacttctagatgatagctttcgccgtaataaagtcttattctgtcgttaacatttctcgcgccatacccttttgactggactgttaagaagttttgggcagtttctttgtccattcctacaccgttatcagacacggttacacatacaagctttttaccttcttcatccgtctgcatcttagcctctacggttattatgcctttcctgtctgtcaacagatctataccgtggtctattgcattttctaccaatggctgaagtataaggtttaaagattcgcatggcataacttcctctgatacatttatcaccacatcaaatgagttgtcatgcattatctgctgaatcttaagatacgactgcatgttgcttaattcctgctcaaagctcagtatattctttcccttattaagcgatgtacggtagtagttagacaatgcgagtgttatctcacttatatcttcctgctcatattctatcgctttccagttgataagtgacaatgaattatagaggaaatgtggattaatctgtgcccttaatgcccgcatctctgattctttctggcttatacgtccttcatatacctgggtaataagattcttaatctgggttgtcatgctgttaaagctatggataaggtcacctatttcatctttgtcctgtgtattaattaccgcatcaaaatctccattttcaacctttgccatactgttttttaatttattaattcttcttgtaatgaagcctgttgtaaatatactcgctgcggcggcacctgcaactgctaccacaaatgcaactacaatcatagtaatcattgaattagctgacctgagtacaagttttctcggttcatagacatatactgtccatccggtaacagagctttccttctttactaccgagtaaccttctgtatttccacatgtatcattatcccattctgccccgtcgattaatgaaagcagcttcttactgtttaatctgtatctggtgttattattttcaaatgtatcactgctgcatataactcttccatcagcatcaagcaccaccattccgcagttctgctcaagaccacctgtaaatgaactcatcatgctgtcataatcaacatctatgtacataattccaagaatcccaagctggtcaagtgttgacatttttcgtgctgaaacaagtgtcctgctgtcttcatcaacaaaccactgtatcttcgtgctttctgtagcagaattataaaaaggccggtctttaatctcttctattggtgctatggtagtatcatgtttaatagctttatccacatatattgttaccctgttaatatcattgtgaaaatacttcaatgatgaaagcatagggtcaaatgtagtgacaatctggttatacatctcatatgtgcttttgtaatcgtacgaaagcactcccgacagcgtatcattaaatgttatataattagacaggttatcatacacttctatctgcccatccactgttgcaacagactgctccaacgcccctttgatgctctttaagtctctgtccataagaatgtttctcatctgacagtaggcaaaaacgaaaagtacaatcaggggaataagtccggttactacatatatgatgacaagcttgttctgcaaccttatatcattgattctctgcttaatctttttcaactcaattctccctgatctctgaatttctgaggacttacaccaaagtactccctgaagctctgtacaaaatatgaaacatttggataacccacctgctcgcttatattcacaatcttcatgttcgtaccggtaagcagttccttcgccttctccattctgtactgtttaatatatttgctcagattctgccctgtttccttcttaaaaagtgaacttaaatagcttggtgcaagataaaccatatccgcaagctgctgtgcaccaatctcttcaccataatggctatgtatatagttctttactgtctcaatctcccgatgtgaagtggccggctcttttccgaaactcttctccagcaaaccaatatagttattcacaatatccataatgcatgagaaatcctctgacttataaagtctgtcaatctcccttccaaattccgcctcatcagcgcctggaatattgtcatagaaatcttttaacagattggaaaatacgaatttaatgtatatatgcgagaagttcgactgtcccctgtatttcttacacagtgcatcaaaatgtattcttaaaaatgtgatatccttcatcttgatatcctgcttcatctgtttcataagtgcatcatcatcaatctgtacaagcacaggtgtatcttcactgacattatcagaaaaaatgtatcttcctgtctcataaaacttattattcatcagtgtatcaacttcatccattacctgtggaagttcatgataatcattgaataaaccggacacagcaatatacataaactgccctgtctttctgtatatatagtcatgaatatttgtaaacatttcttcaatgttcttatcaatattaccatctgctgtgagtgatttatcagaaaatatgataactgactgtaatgggttaagattaagatactgataatccagttccccggttacctctttaaatatatcttcacctgtatcatattttccaaagaaatcagtattaaattctataagtgcaagtctgttgtatcctgccagaaaatccccattatcaagtattcctgatgcatcaccggagttgagcagcgtatacatgtagtactgttttataaagttagcctgccggttatagtcctcgtccttcttgtgttcctcgtcaagctctgttataacccctgtaattgtcgaactgaattctgacgggtcaaccggctttaatatataatctttaactcctaatttaactgccagcttggcatactcaaactcgttatagcctgagaatataattgtctttaaactgatgtcgttgtgcatcacattcttaataagctctattccgtccataaacggcatcttaacatctgtaagcagtatatctatatgtcccattcctgtattcttgtcagatgtcagatattccagtgcctgctttccgttgcacgcctcaaataccccaagttcaattcccattctcttaagaagcattcttattccgcttctttcaatcttttcatcatccactataagtatattatacataaatctaccccgaaactttcctcattcacgaactttcgctcttataatgattatagcttccggggcagttattatcaacttatttagttatattaaagatgccatatatcttcattgtactgttgaattgttctgtctgatgagaaaaatccggcatttgcaatattaacgagcatttttccggcccacacatatctgtcgtcataatctgtgagagccttttccttggttcctatatagcttcgtaagtcaagcaatgccataaaccagtcttttcctacaatctcattatacagtctgttaagactatgagaatcacctgcctgaagcataacatccgatattataaaatctacacatttttttataagagcatctgtctcataaagcttctttgcgttatagtcacatttttcataatgtgcaataacttcatcacttgttgcgccaaatgtatatatattatctttacctacaagctctgcaatctcaacattagcaccatccattgttcctaatgtcacagcaccattgagcatgaatttcatgttgcctgttcctgatgcttctttagatgcaagtgatatctgctctgatatatcacatgcaggaatcagcttctctgccagtgttacattgtagttctggacaagcacaaccttaaggtaaggacttacatctttatcggcctcaataaccttactcaatgtaagtatcagatgaattatatccttcgcaattgtgtatgcaggtgcagcctttgcgccaaatatcactgtaacaggagtctttggaatgttgcctgccttgatgtcaaaatatttatatattatatacagtgcgttcatctgctgtcttttatactcatgcagtcgctttatctgtatatcgtatattgactgtggattaatctctattccctgtgtctgcttaaggtattctgcaagatttctcttgttgtctgtcttaatctcaagaagattatcataaacatttttatcaccagcaaactttaacagattctttaacttctctgcgtcatgcctgtattcacttccaatgagtgtctcaatgtattttgcaagtccgttattacagtggataagccatcttctgaatgtaattccgttagttttgttattgaacttctccggatatatcctgtagaaattattaagctctgtattctctaatatctctgtatgaagctttgctactccgttgacgctcatgccataatgaatatcaatgtgtgccatgtgaacgagattattatcatctattatatacactgatttgtctgtgtacttctcacgcactcttctgtcaagctcttttataatcggcataagctgtggcacaaccctgttaagatagtccacaggccatttttcaagggcttcagcaagaattgtgtggttagtatacgcacagctttttgatacaatatcaattgcttcgtccattgttatcggacttccgtctatatctccattttctgtaagaagtcttataagctccgggattaccattgtcggatgtgtatcgttaatctggataaccgcaaggtctgacagattcttaaatgtttttccggtgttaatacatttttccctgcactcatctaatataagccttgctccattgcttaccatgaaatactgctgatagattctaagaagccttccctgctcgtcactgtcatcaggataaagaaacagtgtaaggttctttgcaatatctgacttatcaaagtctatgctgtcaccttttacgatgctctcatcaactgtctccacatcaaacagatgaagcttattcgttctcttttctccgtacacattgatatcatacattcttgaaactacactgatttcaccgaaattgatagtgtatgtcacatctgtcggaacaagccagctgtccttgccaatccatggattaggcacttccttctgctttccattctcaaacacctgcttaaaaagtccaagatgataattaagtccgattccatcaccattaaggccaaggttagcaatcgaatcaaggaagcatgctgcaagtcttccaagtccgccattaccaagtgacggttctacttccagttcttcaatatctgaaagattctttcctgcctgtgtaagttcttccttaacttcatcatagattcctaagttaataaggttattggataaaagctttcctataagaaactctgcagaaatgtagtatacctttctgccattgtctttcactattctatcacgtcccttttgagtaaccagcttcataagtgcatgaaaacactcctcgttgctgcataagtgcaagtcttttccatattcttccaaacatatagtgttaagcatatcgttgccctccattcttgtatttatattttattatagggttgctggaaaaattctcttgctttataatgggataaacttgtactattctatcatatttaaggagaaccttatgaatataacagattacggaccactgaaagaaaccaagtctcatttcgattcagattttttatataatacttacccatgttccatcccgcttgattttacagaagttccgctgcactggcataatgaaatggagcttatatacatcaagaagggatgcatgatcgtaagcgttgaccttgattattctgttgtaaatgcaggggatattgttgttgtcatgcccggacatatccattctattatccagaacgagtgtgattcatgcgaatacgaaaatattctttttaatcttgatatgcttgtcagcaggcagtgtgattatgataccgtgagcttttttaacggaatttccggctttaaggggtattgccctcctgttatcagtaaaactgtgccacactattctgatttaattcattatattgatgaagctgataatatatgcaagtatttccctgacgggtacaggctgaaaatccgtgcatgtctttttaatttcttctttgagcttaatgcacatttttacacccatacagatatgtctgcacacttgtctgatgataagatggataagctgaaactggtacttaattatattgaaaagaacttcgctcatacaatatcgattgaagagattgcacagtggtgtcatttcagccagtcgcattttatgaagttttttaagaactgcactggaacatcttttatcacttacttaaatgactaccggcttattattgctgcaagaatattaaaaaccacaacccagccggttattatagtggcttcggattgtggttttgataatatatcttactttaatagaaaattcaaagaaaaatacggtgtttctccgagggaattcaggaaataaggtgttattaatataatctgttttttacatattcttcaaatcttggaagtgccattgcaatttttccatactgtcttgtatctataacgccctttcgctttaaacggtcacggtatacagagaataattccggcttcatgtcaagcttttcacgaatatcttttactgactgataaccgctctcagatataacgctaagtatttccttatctttaggtgataactctgcccatatcttactgtatacatattcatctaaatactggtcatactctggcataatatcttcaagtgtatgatcttctctattatcccaataaagatatccaagcacctgaaacgcaaatggatatcctcttgtaaggagtgtcatcttgtcagccatttcatcatttatatcaaatattctcatgtaatggctttttattgccgtataattaagcggctctaatataatcttaggtgctctgtataaaaatgtaagtgacttttcattctgtaaatcatatatgttctcatacaatcccgtcatcaaaagatatataggatattcttctcttaaaaatatctgaaatgaacttgcaaatattttaatattctctgaattaataacctcatcaattgttataagcagccttttccccagacgttttatgtgagaaagcattatctcaataacattttcaatatcagtaacaggaacagaattctcaactgttacacccaatccaaatactgaaaagtcaagctttgctttaacaaatactgcatgcatttctggaattgcatatatctttgctgccaggctctgtaaaagattccggttaggattaagctcaactactatccattcatctgaccgtttccgtatctctgacgcaatgttagtcatcattacagtttttcctgaacctcttactcctgttatcatatatatctgattaggtgattcttccgctgtaaaatctccaattattctttctgtctgtgcaattctcgaaatatactgcactggttttttcccaaatgataatgtaaacggattattcatgcgcagcctcctatataagtttatataaccttttataactttttgtttgttttataactttatataagtttttataactttttatttattatataaccttttataacttttatcaattgcgaaataaaaaatcctgctctcaggcagccataaccacctgaaagcaggattaacattttaattattaacacattacattaaaccatgtgctctgttgtaagcattacatatcttattagaattcttgataagaatatgcattgcaacaaatggtccaattccacatataaaagcaccaaaaatctgccataaaagaacagttgtaccattctcctggattgaaagtccataacgaggtccgttagatgcaagtctgttaccaagattatagtaccagaaccatgcatatataccacatgttatgagtgataaaagaacaaatgcaacaagccctgatgtattctctccatctccctcacatgcaatattaacatcatgtgccatcttgtaaatgaaataatagctgtatattccacatgtgataattgaaagaattatgtatgaggcaagacctctgtcatcctttaatcttgtacctgagtatggtgggattgtgccattattataaccattgctgtaattctgattagcattgtaaccctgattattattctgattattgctgcctgtaaagctctgctttacctcattaaaagcacttcctagttcctgctcagccttgttgaatacctgacttgcctgacttgcaatatcctgctctggcgaacaatttgctccacaatatgggcagaactttgttgaatctggaatctgttttccacactttgtacaaaacatattaattccctccccttcataaatttagtttccgaatgatacggaataggatattgttctgaggttcaaaaaccacaatatctccagttccaataaacattctatacaagtaaactataacaaatgcacctgccattgtaaacataaaaattttataaaatttaatatttattttagatttaaaaagcataactatcacaacaactggcggcagaaaaaaaagtggatgatacatgaacgcatcatgaatattaaaatgcagtaaagatatccatgcccttgacattccacagcctgcacatgatattcctgttatgtattttatagggcatgtaaccccgaagctttctagtatcacatacagcacaacaactgccgcaactgatgttatcacttctattctatttaatcttcttttatctgcattgtctccgctcattattccccctgataatgctttttattacattataatctctcctgcaagcaatgcaagacaaggaagcgtaattatgctaatcaatgtagacaaagtaacggcaccaactgcgagcttctggtcgtgaccgaacttaattgcaaaaagtgttgtaatagctgcacacgggcatgcctcaagtataattgtaataacagcaaccattccacgggcatgtatcagatacataaccaaagtacagattaccggtataataaacatcctgagaataactgtaaaatacactcttttatcctttaagatactcaataatgggaactgtgaaatagtaattcctgttattatcatagacaacggggtattcatgcctcctacaacattaaatgtatcctttaaaacatccgcaaccggaattcttgcaaggaatataacaagaccgaccgcaaccgatataattggtgggcatgtaacaatcttctttaaaagttccttgaaactcatactctctgaaacatacacaattccgacagtccataaaagaatattgaatacagtaacatatacgctcgcatacagtacaccttctgaaccgtacattgcctgaataagtggaaatcccatataagccgcattagaaaatgtagttgcaaatcttataatgccgcgcacttcctttttcatcaaaaatgttatgccaatcgataaagccattcctatacatatagtaagtatgctgtaaaaaagcattctgcccatattcttaagaatctcggcattatatcctgacatgtaagaattaataatcatgaatggaacaacgaaatatataagaaggttagaaagcatcccctttccttcttcgttaaccatcttaatctttcctataacaactccacacagtataagtatgaataactcaaatacctgcttcgcggtaataagtgctaaatccatagctctcttatcctccttttcatacacgcaaaaaaacatgttatatatttcattttttgaaatatataacatgttaatagcaaagtcaagtaaaaatctaatactttatctctggcataagctctgcacttattacattaagcatacgttccattgtctctaactcttctttagaaaatctgtcctcaatcctgcccattacagtcttaagatatgtattgctgatattataataatctatatacttctgtgttacctcgagatgatactctctcttgtcttcctcagactgtactttctttaagtatcccttcttaacaaggttattaatcttatacgccgcgttaggagatgatatatttgccatatcagcaaactgtgccacagtaggtttatcaagtgcatatattatctccatgcagaaagtttctacagttgtaagagatgtctccctctcctgtagcttttcaaacattttctgataaaaatgcatcttaaacttcgtatatactttactaaaagaatcctgcagcaccttactttacctccaaagcttttttaattgtttattattataacaatagctctattctattgcaaatgtaagttcagctgacactgcaagttttccgtcaacataagcttctgcctttcctactcccacaggaccttttcttgctataatctcgcatgacatttcaagcacatccccaggtgtgacctgagccttaaacttagcatttttaattcctgcaaaaagtgctatatgtcccttattcttttcttccgacaataaagcaactgctccagtctgcgccagtgcctcaataataagtactcccggcattaccttcttctgtggaaaatgtcctacaaaatgcatttcattggcagatacgcatttaataccacaagccttctttccaggctcacactccgttatcctgtctactaatagaaatggatatctgtgtggcagaatctgctgtatttcatctgaattaagctgcatctttacaccacctttctaagcacgatggacgcattatgtccaccaaatccaagtgaattagacatagcataatcaactcttgactctcttgccttattgggaacgatatcaagatcacagtcatcatccggcacctgataattaatggttggtggaattatatcattctttacagcaagtgccgatataattgcctcaacagcaccacttgcacctaacatatgtcctgtcatcgactttgttgagcttaccgcaagcttgtacgcatgttctccaaatgccttctttatcgcgttagtctcgcccttatcattaagctttgtacttgttccatgcgcattaatataatcaatattctctggttttattcctgcatccttaacagcctcagtcattgcctgtgctgccatgcttccgtcttcgagaggggctgtaacgtggtttgcatcacatgttgagccatatcctgcaatttcacagtatatcttagcgcctcttttcagtgcatgttcatactcttcaagaataagcacacctgctccttctcccataacaaatccgcttctttctttatcaaacggaatagaagccctgttgacatcttctgctttgcttaatgcatgcattgatgtaaaaccaccaattccaaaatcagttatacagctttctgcacctccgcacacaatcacatcctgatatccatccctgatctgtcttaatgcatctccaacagcattggttccactggcacatgcagtaacaacacatgtacacattccatgtagtccgaatctgattgcaacatgtcctgccgccatattagttatcgacattggcacaaaatgtggcgaaactctgtcatatcctttactttcgcctcttaagcattctctctgtatagttgtaagtccaccaattccacttgataatataacaccacatcttaatgtgtcttctttgccaaaatctatagctgaatccttcactgcttcatctgcagcagcaagtgcatatatcgtgaaatcgtccattttccttaattctgctttatcaacaatactctctgcgtcaaagccttttacttcaccagcaagcttgactgcactgttttctgtattaaaatgtgttatcttaccaataccacatttaccagcctttacagcttcccacatatcattaacattgtttccgacaggagtaactgctcccatacctgttattacaactcttctcatattgccattcctccgtctacacaaagtacctgtccggttatgtatcgtgctccgtcacccgcaagaaatgctactgtttctgcaatatcttccggctttcccatctctttaaaaggtatattctccaccactttttctttaacagcatctgacattgctccggtcatatcagtttcaatcattcccggtgcaaccgcatttacagtaatatgtcttgacgcaagctctcttgcaagcgacttcgtcataccaataacgcctgctttacttgcagaataattaacctgccctgcattacccatgacacctacaacagaactcatattaataattcttcctgctctctgtcttaacataagtcttgagacaccacgcatcatataaaatgtaccctttagattcacatctataactgcatcgaaatcctcatccttcatacgtccaataagattgtccttagtaattcctgcattattaacaagaatatcaattcttccgccaagtaaatccacagcttccttaattaaacgctcacattcctctgaatcactcacatctgccttaattgcatggatttcaattccatactctctgcataaattaactgtttcactggcagcctcatcacctgaacggtaactgaatacaatatccgttccttcacttgcaagcttaacgcatatagcccttcctattcccctgcttgcacctgtaataagtgcttttcttctatcactcattccatatcctttccaaatcaatgtcagatttgcttaatcacagcttttatgtccgatttattcaatctataatctgtcataatctcattaataagttcctgtacgctcattatccggtcaactctgtctgcattacttcctgcaaaaaacagtccattatcccagtcacccttaactgctgctataagcgccctgcttatgcaatatggtatactgtcatccttcttacatgctgtaagacaaccattacattttcttgcggcaaaggtttctcctgcatcaagcctttcaagcagtggactgttaattgcacgcgctggcattccaacaggacttttaataatacggatgtcttctctctttgcattaacaacagcctgtttaaatgtatccgaagcatcacattcattggtagcaatgaatcttgtcgcaatctgtaccccggcagcacctttatttacataatgtgccatatctttgccatcaaacactccaccagcgacaaaaaccgggatatccgcacccgactcttctattacagcaagtacatctgacagtatttcatcgttactctgtgtttttccctgtgtaatatcatctgcaccaaagcctaaatgtcctcctgccatgctgccttcaataatgaacatatccggatacacatcataatgcttcttataagttttcataattatcctggcagccctgccacttgaaacaatgggtgctgccagtgtgtgtgttcccttagtaaactgtggcagattaagaggcagtccggcacctgagataataatatctgcccctgctgaaactgcagtcttacagctttcatcataatgagaaaccgccgtcataatatttacagctacaagtcccttctttgcactttctgctgcaatctgcttagccctcttaatatggtaatcaagtgcccttagattagccttatatgggctgctcttaaaatcctgttcatcataacctgcattaacagaactgatgactccacatgccccgcttgctgcaactgcacctgcaagggatgaaagcgaaactccgacacccataccgccctgaattaccggaatatcaagtaccttgtccttaatctgcatacaattcctttcgcacagcctcatattcttcatatatttgttcaaatattttctcaattggctgtatcttatcaatctgacctgcaacctgacctgccatcagtgagccgttcattgtgtcaccgtcaaacactgccttacgaagagaacctaatgtatatttctcaagttccatcttatcagcacctgccttctcctgctttacatactcgcgtgacatctcatttttaagcacccgcactggtgtaccagcaattcttcctgtaactatcgtgtcattatcctttgctttaagtattgcctgcttataattatcatgtataggacactctgtacttgccagaagacaagttcccatctgtacacctgcagcaccaagtgcaaatgctgctgcaagctgtctgccatctgcaattcctccggccgcaataaccggaatattcacactgtcaactacctttgggacaagtgtcatagttgtcatctcaccgacatgaccaccactttctgttccctctgcaactactgcatcagctccgaagcgctccattcttattgcaagtgctgcacttgaaacaactggtataaccatcattccatcagacttccatttttccatatatttagccggacttcctgctcctgttgttacaatctttacattttcttccacaagcagttctgccattgcatcagcttccggattcataagcataagattcacaccaaatggtttatctgtaagtgtcctgcattttcttatgttttcacgaagcatatccgtgttcattccaccagctccaataagccccagtccacctgcattactaactgcagctgcaaattctcctgttgcaatattagccattccgccctgtataaacggatattttattcctaacatcttatctaatctcattatgctgctccttattatgtctctatcaaagcactgctccagctaagccccgccccaaagcctgcaagaatcagctttctgcctttatcaaagcatccgctttttgctaactcatcaagtgctattgggatacttgccgctgatgtattaccgtattctgctatatttacatagaacttatcttcatgccccggatatttcttctttacatgattaataattctttcattagcctgatggcacacaatataatctacgtcatcaagtgtcatgtccgattttttcaatatttcatcaattccctgtttaagaacatcaactgcaaaacggaacaccgcatttccattcatctttacatatgcatcctgtgcacctatacctctgcatacaagtacatcagtatcgcctcttgtgtaattaatctgtctatacatattgtcagccgcttttataagaactgcaccagcaccatctccaaaaagcacgcatgttgagcgatctgtataatctaaaatcttagacatctgctcgctgccaataagcagtatgtatttataatcagtgctgttaaacagtgcctgtccaacatttaatgcatgcagaaaacctgtacatgcactgcttaaatcaaatgcaagtacattctctgccaatccgagttccttctgtacaattgctgcagtagatgggaatgcattatcagccgttgaagttgcaactataactgcacctatttctgcaatatccacacctgatgcttctaacgcttcatatgctgctctgactgcaagtgatgtagtattttcctttgtacatctgtatcttttcttaatacctgttcttgttgttatccattcatcatttgtatcaacaatccggcttaagtcatcattcgtaattatctcttctgggagtgctttccctgtggacactatctgaatgcctttcactttatctctcccctgtctatattcctgaatttgtcatatcttgaattaacaagctcttttgatttcatcctgccaagaattccgagttctttttctaacattcttgctatatctgaaaaacacctgtctccttctgcaattacaccatcaacgagtccggcagtaaaaagctcctgtgcagtaagcttcattatctcacttgcctgtggtgctttcttagcatccttatatattattgatgcaaaaccttccggagacagaatcgaatatactgcattttcaagcatatacaccctgtcggctgctgccagtgccaatgcaccgccacttccgccttcacctgtgattacagatataacaggtactgtaagcttaagcattgctgctatacttcccgcaatcgcattactctgtccgttgctttctgcttccatgcctggatatgcacctggcgtgtcaacaaatgttatgacaggtctcctgaatttttcagcctgtttcataacacggactgcttttctatacccttcaggtgacgccattccgaagttatatcttatattctcttctatattctttcctttacggtttccaataacagttaccgtttttccattaaatgaagcaattcctgcaacaaggcttttgtcatctttataatatctgtcaccatgcatttctataaaatcatcaaaaagcacttctatgtatttcataatatccggacggtcgctttttctggctgcaagaactttctcatatggtgttaaaacattttcattgttcatgcttctcctccggtattcacatgcattttcaatatctttgataaagtctgcttcatatcttttctgtcaactatcatatctatcatgccatgttctaacagaaactctgagtgctggaagccttcaggcaacttctgtccgatagtctgttcaataactcttggcccagcaaagcatataagtgctcctggttcagcaattataatgtcaccaagacttgcaaagcttgcgctcacaccacctgttgtaggattagtgagatatgatataaataatccaccagcatccttgaacttttcaattgccgctgttgtctttgccatctgcataagcgagaaaaggccttcctgcattctcgctccaccacttgcagcaaatattataagcggcagttttcttttcattgcatattctgtgagtcttgtaatcttttcacctaccgcaattcccatgcttcccataaggaatcttttatccataactgcaaccgctgttttgactccgcctattcgacatgttccagtaactactgcatcctgctggcctgtctttaatctgttcgcttcaacctttttctcatatcccggaaagctgtttggattgcctgtcttaacctgtgcatacaattccctgaaacttttgtcatcacttataagtgcaattcttcttgatggtgtaaggcttccgtctgcctgttcctcactatcccttaatctgttgatagtaccccaccttttcttacgctttaagaaaatgtcattgatattcatttaactgtaattccttccttaagccacttttcaatttcggtatgattcttctcccagaaacctgtattgtaatttcctcttataaaatccttatgatatgtaagaagatgcatgaactctctgttagtcttaactccttcaattatcagttcctcaagagcccttcttaatcgtcttaccgcctcaagtctgctgcttccagtcactataatcttggcaatcattgaatcataaaacggactcacttcataaccttcaaaaagatggctctcaactcttactccataaccatctggaaaatgtaagaatttaataactcccggtgtagccgcatttattctgcactcaattgcatgtccattgacacatgcatcttcctgagtgatattaagcttcattccggcagctattcttatctgttctcttataaggtcaattcctgtaacctgctcagttaccggatgttcaacctgtattctcgtattcatctctataaaatagtagtcgccctgttcattcacaacgaattcaacagttcctgcactataatatcctgctgctctggcagctcttaccgcagtctctcccatgactgtccgcttatctttacataatcttgcactcggagcttcctctaaaagcttctgattattacgctggattgaacagtcacgttcaccaagatatattgtattgccatatttatccgcaagaatctgtatctcaatatgccgtggattgattatcagcttctctatgtacatatcatcattgccaaatgcagctttagcttcactcttagcggtttcaaacgcattttctatatcttctctgctgaatgccttgcgcattccttttccaccgcctccagctgacgctttaataagtacaggataaccaattctttctgcaatgtgtgctgcttcctctgctgttgcaaccagaccatcagagccgggtacaaccggaaccccgcattcaatcataagctgccttgccgactgtttatctcccatgctgcttattatgtccgccgatggtcctataaatataagattgttctcctcacattttcttgcaaaagcagcattttcggacagaaaaccataaccagggtggactgcctcacaccctgtcagtattgctgtttctattatcgcatcctgattaagataactttcagccgcctttgccggtccaatgcaaaccgccttgtctgctgccataactgcaagtgaattcttatctgccgttgaatatacaattacggtttctacatccatctcacggcagcatcttattatccttaacgctatttcaccacggtttgctatcagtattctcttaaacacttctgctacctccgttaattaaggattacaagcggctgtccatactcaaccatagtgccattctctgctgccacttccttaaccgtaccgtcacaatctgctgtaacttcgttcatcagcttcattgcttcaattattccaataacatcaccggcatgaacgctctgccctggttttacaaaaggttcctcatcaggacctgctgctgtataaaaagttccaaccaatggcgccttaatttctttaatatgctcatctgactgtggctgtacatcctgaatagctgtaacgttctgttcctgttctgtaccaatgcgaacaatatctttctttacaggcacatcacatatggcttcgtgcattgttttcttcagtccaaggcatacgccattcatctccagattcagttcgctgcatccacttgcatcaaacttatctataatcccataaatatcattaatatccataacaaactatcttccttaaaatctttatgttaagctgcattcttgtcaacatactcaacaattgctttaactgatgtaagattaggaagttcttcttctggaacagtaattccataagcatcttcaactgccatcataagttccatagaatcaagtgaatcaattccaagatcatcctttaaattcgcttctaatgtaatcttatcctctgagcagttaatagtatccataataatttcttttaccttttcaaatgtcattgttttgttctccttaaataattttatctaaatatatttaactaatatatttgagctaattataagagcacaaatctggtttgtcaatactattttgatattcaaagtatttattttgtttcacagctgagtattattccgcctcgctcagcataataactgcataatcctcctgctttatatacacacacatccgtagcaccatatgcctgctttatcatatctgctatcttatctgcaagaacttcattctcaacatgacatattctcagttttccgccttcatatcctgcatcgtcaagtaatgcctgcagttttacaagaagctttttatcacctctgcatttaccgattgcttccaatgttccatgactgcttgctgttcctattacacttatgccaagaacctccgcagccgatgctacaaccttgcttacacgaccattctgtgcaagattatgcaatgattttaatgaacagaacagtcttgttttctgcatatatgcatctattgctccatctatctcttcaaatttctttccttcttcaatcatttgctgcaattgctccagtataatacgcatctgtggaccagtgcttttagaatctattaccctgactttagcctgtggatgttcctccagatatactgccctcgctgccattgcagaattatatgttcctgacattcctgcagttattgttacaacaaatatctcatcatcatcaccaaaagcttcaagccatgcatctattccagggcacgcagtatatgaacgtcccttatgtttttcaagaatatcaagcattctgtgaatatcaagctgcccatcatcacaaaactcctcgttatctgtagatattgtaagcggaactgccttaaaaaccattcccctaagttcttttatatcgcatgctgaatctgctactaatctcattattaatcctcctgtttaccagatatactccattctaatgtagttttaaatactatgtcatattgtattttataacttatagtgttacaatatacaaaaatagcgtttttgtatatttcaggagtacattatgaatatagttaacaaagattctaagaatacatttacacgaatgtgcataggtgaagcaataatcaagcttcttaaagacactgattttgataagattcgaattacgagtgtggcgaaatgtgccggtgtatcacgcataactttttacaaatattatgaatcaatccatgatgcactatgcgactatcttaatattattataattgaatatctggaagaatgtgccaagaaccctgaaaacgggagctttctggattattcccacattctttttgcacttgaattctttaaccggtataaggattattttcttactctttcaagatgtggacttcattctattcttattaacagtattaataattttatgtctgaacattttacaaatcctaagaattactctgagtacagactatactgttactctggcggattgcttaatacatttttaaaatgggaagaaaacggatgtgactgtgatgctggcgagatagcccgaactcttgaagaactttatagttaataagccactccttccggaatggcttaaatattttataatcatttattaatctgtgaatgcacttttcgacgtactataaggaaacatataacctgcataattatcgttgccgtccatgatgccggatatgatatgaacaggtcataaagtgttctgtggcttgggaatatcacgaatatccagaatattctcattcctactgtaccaataactgataatatcatcggcactagcgaatatcccattccacgaagtgcgcccggaaacagatccattattccgcataagaaatatggcactgttgtaattgataatatctcaacaccacatttaataacatcttcactgttagtgtatatcataagcactttatcaccaaatatatatgcaccgcagccaaatacaagtgacactcctactgaaagtattgcacaatctataagcaccttgtccattctcttgaactttcttacaccataattctgacttgtaaaactcatgcaggcctgtgttactgaattaattgatgcatatagaaaaccaagaatattgttggctgctgtatatcctgccattgctgttgaaccgaatgaattaactgacgactgcagcaaagcatttgaaaaattaataactgtactctgtatacctgccggaattccaacctgaaatatctgtttaagatagtatccctttatctttagctttgagaatctcaactggtaacttgcatctgtcttattcagacatcttaatacaagcacacacgatataaactgtgaaaatattgttgcgattgccactcctgcaacccctaagttaaacacaataacaagtaccatattaaggcatgcatttataattcccgctgctataagaaacatcagcggtctcttggtatcaccaactgctctaagaacagccgcaccatagttataaagcataaagaatggcataccaagaaaatatattctcatatacagtgttgagaggttaattacatcatccggtgttcccataagttcaagtgccggtttagccatcagcacgcctatcagtgccatcacaattccgcttattgctgcaaatgttatcgcagtatgcactgtctctgacatctctttatgtttgcctgacgcatagaatctggcagccagtacatttgctcccaaagaaactcctatgaaaagattaacaaacatattaataagtgctgtcgttgaacctactgctgctaacgactggcttcctgcaaatcttccaacaacaattatatctacagcattaaacattagctgtaatattcctgaaagcatcaatggcactgagaacgatattaacttatccattattgtgccattgcacatatctatttcgtatttattcttactcattgtaaatttcctttataaagaattggacagactattcccaatatccaagttcaacaccttttttatagattcctacgcccttagaataatatccatacgcattaaaatgtgtccagtctgaacggagtttcacagatatatacccaaacgctccatataactcatctatcttttcctttttcaaaccacaatcatccagcccgttctgaatcatgtagactcttgtattaaagaaatgttctccaaatgcttctcttagcgctgcttcccatgcagtgtcatcagctcctacatagtcatctccatcctccagatatgactggctgttgtctgcaagagatgtacccggatcatcagtgtctccaactatgatataattctcacagcctgtataatcaatcaccgcctgatactgggaaataagctcatcatagtcatcccatccaccgttacttcccatctcaagcacaagaatatcacccttatgatcatatgctgctttagttgtaacagcagtaccttgtggaataaacatataatcaggctgttcaagacctgtatcatcacatattctgatgctgaccatataatcctctatattatagtcatcatcctccatatcttcccagtaatcttcaatatcccgtttcttatcaatctgacataatacaccatctatatatacagtatcaggataatcattatattcaataccatatccgctgaaatcatacatataaacaggatttcccttatcatccataaggcatacatcctgatatgtattcttattaagattaagattacggtcagtatgcatcttaaggccaccagctcttattgctatctcctctgatgtctcccctgatacaccaaaattaaatgtattaagaccagtaagcttccccaaagtatatggtgcagtataataacttatatcaactcttcctgctttagtaagtatataagcatcatctgagccaaagccttccatcatgctgtcgccccagcaggcaattgatacagtatcatttgaataatccttatcatcttcataaggctctgtataatcttctgtaccgatattctgtgcgaccttcacaattacatgtgttttatctccccgtggttttatgatcttagccatattaataagattatctttagtttccggtctgccattcaataccacagaccctgcggcaatacctcctgcaagcaaaaccactgcaatcccccatatcgctgctttctttaatttcataaactcaccttttctgccccttatatatctggcacttctgttataacacttatttacccgacctgcaaatataatgaagcaatcaaagcaaagattcagtaagggttcgattcacatcaccctgaaataattcacttagacaaaaaaatagagcgggtgatggggtgccaggtgcctgtggcacctgcctggcaccgaccggagcgaagcggagaccgaacccgtgggttcgattcacatcaccctgaaataattcacttgaacaaaaaaatagagcgggtgatgggaatcgaacccacgtatctagcttggaaggctagtgttctaccattgaactacacccgcataaccactgatatctcagtgctttgttaagatatcataattatattataaagtcaagtattttatgccaatatgttctttgcgacatgttttatcgacacatatacttgacattatctgttcttaggaataaattatgttagttgcattttagtttgtaaaatataatggagtaatttcaatgactaataattctgaccacattttttctaatgtagatataaggaagcttctaattcctatcatgctggaaaatctcttagcttcacttatgggaactgttgatactatgatggtaagtaatgtcggtgcatctgccgtctcggccgtatcgcttgttgattccatcaatattcttgtaatacaggctttgtcagcacttgctgcaggaggtgcaatcctgtgttcccagtacataggaagcagcaaccctaaaggtgccaaccgcgctgcaagacaggtatttcttgtcatgacagtgctgtcgtttttcatatcagcaatatgcctcgttcttcgtgtaccaatgcttaagttcatctttggttcggtagaagctgaggttatggctgattcacaggcatacttcctttttaccctgttgtcatttccattcattggtctgtatgacgctggtgcgtccattatgagagcacagaaggacagcaaaagccctatgacaatatccataatatccaactttcttaatataggtggtaatgccattcttatattcggacttggaatgggcgttgcgggagctgcaatatcaacacttgtatcaagagttttctgtgcagttgttgtaattattaaattaagaaatccgtcacagaccatatgcgttaacagatattacacaatccgtcccgactgggatttaattaagaaagtcctatatattggtattccttcaggtattgaaaacagcatgttccagtttggaaagctggccatccagtcaacagtttcgacgctcggaactgccgctattgctgcaaatgctgtgaccaatattctggaaaaccttaacggcgttgctgcacagggtgtaggaatcggacttatgactatagttggccagtgtattggtgccggaagaaaagatgaagccatatactatataaagaagctcagtaaaatggctgaagctgctattattataagctgtcttgttgtatttgcattgtgccggccgattaccatactgggtggcatggaagcagaaagtgcaagaatgtgttttgagatgactcttttcataacaataaccaagccaatatcatgggtattgtcgttcattccagcttatggaatgcgtgctgccggagacgtgaaattttcaatgattacatcatgtgcaagcatgtggttatgtcgtgtaagcttcactatattcttatgccgtgtatatggttttggtcctattgctgtatggattggaatgtttgccgactggactgtccgcggtataatattcaccattcgctttcattcacgcagatggcttaaccaccatataattgattaatattaataaattggattaacgataaaaaacgcatgtcagattgaaaaaatcggacatgcgttttattattttgttatgaattataatattgtattgtaaaccatattattacaatcagccattatcctagaatcccttgcagttacccttaagagttgctcctgtaatattaacttttccattaatattagtacaatcctcaataatagccttgccaaatgttactttataaccaagtgcagatggttttcctgtaagtggccagtgataattattacccttattagaatctgaaatacaattcttcattgttacaacaccactctggttgtttctatcgaaaccattagcatagtttcccttagctgtacatccaataagcttatggttaagaggatcaaggtgagctgcctttcctggtgttttgttatctactccacccatcttaaatccattaccatcaccatatattccatcacagtatccattgtagttagcctgacagtttacaagtgttactgctccatgagctgcataacaatcccagccatcatcactattgtattcagctacacaattttcaaaataattgccttcacctgaatgaagttttactgcaaaaccatcagcattctcacccttagcatctgcattatgatgagacttgcaattataaaacttgttattagctcctccgttgcttacctgaaaacctgcatcttcattataacagcatgttacatactttaatgtattattagaacctgaaataaagattccattatcagaagcattcttaactgtaatgttagaaagtgtgcttccattacctgataatgtaattcctcttcctgaacttccgcttgtctgtgagaaatctattgtcgcattattctttcctgcaagattaacacctgctggaagtgaaacagctccggacttaactgttccatcaataactactgtctgtcctgacttagccttcttaagtgcatctgctaaagacattccacctgccttaaccacataatcacctgatacagatgaacctgatgatgtacctgatgagctgcttcctgatgaagaactgcccgaacctgatgaacttcctgatgaagaaccagatgatgagctgcccttagaatcaacctgaaccttataaatgttgattccactgttctctgaatacagatatatgtatcccttagaacctgaatatgaatatgttcctaaagaagctgtcttattagctgcaatagttccaagcttctttccattagaatcagccacaattaaattacgggtagagcttccactacttcttaacactacctttattgtatcagaacctgacaccggtactttaactgaacggtacgatgtagtgcctgtaccagaaagagccagacaatatgtatatgctgtgccatctaccgttacagattcagccttgacattcatagtcttactgcttgttgccataagaccaagtccgtctactgtagtacttgatttaatagttcctaacttcttaaaattagaattcttgaaattccatgaattctgtgttgccgcattagctgacaacactggtgctgctgtaaaacatactaataataccgcaacaacagctgcaaaaacccttcttgccttcttaatcatgattaacctcccaaacattatagattaaatagcaaaagaggcgttattttgctggcagtgtcctatatcatgcaaaataaatcgcctctgttgctaaaaataccataatagggataaaaatgaaatagcttaaaattacaaagattcacgcaagtgtttgtgcattttgtatagttagttctgaaatataccgtttttttaatacatttttacttaagaactgatttattgtcacttaccttgatgtgaaagaggttatcctatgtataatatttgattcctttaagaggatatggtcaacatttttatggacgtaaaaatgtatttcaccgcacttttatgtacgaatttttgtgttgcattacattttttcgcacgaacttttctcaatccactcatctggcatctcaaaatgctggtaatcttttgcatgttcccagtcgccgccccactcaaatccatgttctgcaaacaccttatagcacaaatcgtcatggtcgattttgtgtggaaattcaatgcttctgtctgtatacttttcagcattggcaggctctacatttcttctgccatcaacatatttcacataaggattataaagcgtgttgatgtcaaccgccagccctaacgcatgctttgacagcttcgttgaataggaaatgtatctgaaattaaacgctgaagaattattatcactcatcgacttctcgtcatcagcatcatattcatcaataagtctgattttttcaatctcatagccagcctcgtaaagctgcttaaatatatcaagcacatcatcagcaatcagcctgttcacaaccagctcacctatgtgcgtttccccatcaaatccgacatgcaaaactttaagataccgcaaatcttctcttggaacggtgcagttgtccttaaatgatttcccctgcattttggcaaatatgtcgtctggaattggtgatatggtaaatggttgggtgttcatatgtgactcctttactttttctggttatagcttcattatatgagatattttatcataagacctaccaatgtgtaacaaaatgaagattgagtatgtctataaaacacgtttgcgaaagcaacttgcaggaaaagcctactagattacatataaaagaagtattagtgggctttttacactgacaataaatcttgtctatattaacagtcgatttaatataaaaaataaacctactacaaacaggtaatctcccgatatagtaggcattttcttttgaaagcttgaaatctttctcagatttgacccactaaattgacaatgcatcatcaattcgtaggtttttcttattaatacgcacagaatccagcaggtatttagtactcaaattcaactatcctgcaattctcacatatgcatgcttccactttcgttctgtggctcgccttaagcggtgtgatttcaacaaatcctttggctgttttcgcatttgtgaatactccaggcacttcatcggcaaagctgaatgcgccgtctttactgctgaaaaggtatccttttcgcatttccttattacattttggacaaatcatacataacacctcattccttaatatctttactaagaaccaacattgccatgctaagtttttcttcaaactgctccgctttaacaagcgctatgccctcattgtcatcgccaagcacaaccagcctgctgccattcaccagtccaaaagtctctctagcctctttaggaataactatctgaccgcggtcattcactgtgacaacaccccacatgtgtttgcctttgggtgccggcgccatcttctgcccttcaagctgcacatcgtcctttattaaggaatccatcgtcacgccataaaattctgcaagtctgccgcatttttcaatgtcaggaattgtttcaccacgctcccatttggcatacgcctgcctcgatattccaataacctctgcgatatcctcctgcgtcttacccgcaagcgacctcagcataataagattctcctgtagcataatgtcagtcctttctgttgttatgtatgtattataatccttgtaaaatgtggattccaccaattgtagttgtcagaaaagtgggaattgtggtggcgttggttgcgtggaggggattgcttatattaattacatattctaaactaaatttacaatctactacatatctacgattcattatattaatattaactctgttaaaaaaagctctaagatacatttaagacttgattgctgcataaatagtattaattatcgaattaatatttcttattctcgatagatttataaactagctttgaaaatgagaaattaatataacctcatattcagtttgatagttcatctttaagaaagaataatcaaaccttttatcatgtgtcattttatattccactatgtaactattaattcattgataatccgatacaagcagacattacaataaaatttacatcccactatgtaactattaattcgcatttgagctatattttatgcagggcttagactatgatttacatcccactatgtaactattaattcccagaaagaatcatgtcgaaccactttttcttgatatttacatcccactatgtaactattaattcggatttctgcgagtatgttctcttgcgtttctgtatttacatcccactatgtaactattaattctaaagagttatttagtttcttgcctgctgaaataatttacatcccactatgtaactattaattcgaatgacgggagtgaaccttttcctccgattccgtaatttacatcccactatgtaactattaattccttagccttactgaaatcagccatcttaagaacataatttacatcccactatgtaactattaattctacgattttggatatcaatccccagtatattcttcatttacatcccactatgtaactattaattccgctttgcaagctttgctaagttcatatgtgttattatttacatcccactatgtaactattaattcattcatgcttaagcctttcttgataaagacatattaatttacatcccactatgtaactattaattcgataagatttaccaccgcttttttctccaagtatcatttacatcccactatgtaactattaattcaacatatctgtaatcctgtataatgttcttaatgaatttacatcccactatgtaactattaattccaaatgtgaagaaccaatatacccagtctttaatatttacatcccactatgtaactattaattcttttgcaaaggtaaacggcagtctaataaataatgaatttacatcccactatgtaactattaattctgtctactgtatcatagaaaatcattaatttctcatttacatcccactatgtaactattaattctgtgttaaatctgccgtaactctccataatgtcatatttacatcccactatgtaactattaattctctactgtctgttgtgccattttgcctgtcgtttgcaatttacatcccactatgtaactattaattcgctataaagagctgacctatactaagcgtattgagcatttacatcccactatgtaactattaattctggtattgccgacactgacctctcctgcgttccgtatttacatcccactatgtaactattaattccttaataaattgtctcgatattgtgagccgtccgacatttacatcccactatgtaactattaattctggttgggttagccgccaatcgcctgatgatgatatttacatcccactatgtaactattaattccaatgttcgtacattaacatataaaaatcaaactcatttacatcccactatgtaactattaattctttttttccgttttcaatcaaacatatatattgttatttacatcccactatgtaactattaattcatatccttacacatgtataacgccattttgacgaaaatttacatcccactatgtaactattaattccttcggtgatgtagcattcggttctgacttccttatatttacatcccactatgtaactattaattccagcagccagacaggaaaagaatctgtaaatatcaaaatttacatcccactatgtaactattaattcgtgtataactcaccttcacttgtgacataaaatgtatttacatcccactatgtaactattaattcttttatatttctgacaagttcgtctctgtaactcgtatttacatcccactatgtaactattaattctttaggttcaacagatactacatatgtacttatctgatttacatcccactatgtaactattaattctataatcggcaagatgattatatatctaatcgtgtatttacatcccactatgtaactattaattctgaggtagaagatgaccctaaatgggatttaactaaatttacatcccactatgtaactattaattctatgacagatatgaggatattacaactactagaagatttacatcccactatgtaactattaattctgcaagccttttcaagctggttgtggactagtgacatttacatcccactatgtaactattaattctaaatgtgtgcaatacgttagggggtgtataataatttacatcccactatgtaactattaattccttgcatacttcaaaagttgtttatctgttgccaaatttacatcccactatgtaactattaattcgaccaagcggcgctcgtttacgacgctttttacaaaaatttacatcccactatgtaactattaattcaacagaagacgatacaattattacaaattcaattcaatttacatcccactatgtaactattaattctctgttccatgctttttaccccttccatgattctttatttacatcccactatgtaactattaattcaataagaaccgagcttgatgatgcaagaaatgaaaaatttacatcccactatgtaactattaattcaaatggtacagcgtcttcctgtactttgttaaacacatttacatcccactatgtaactattaattccatttgaaactgtcaatatatttcaaaggcaaggacatttacatcccactatgtaactattaattcttgttgtcaatctcaacttccatgttgtagaacttaatttacatcccactatgtaactattaattcgtattatgcggtaaaagatttgtataaatatataaatttacatcccactatgtaactattaattccgatagtgtcaacaagttcaaatatatccatggtaatttacatcccactatgtaactattaattcccgtaagtttttatacagctttaaatctcaaaaccaaaatagttatttgtcgacctaataaattcatacataaatttctaatgctattttgaataaattcaacttaaacatattaatagagccattgtcgaccccgcttatattttacactataatgagtcgacaatcaatttataaaatcaatattttcataacatagtataattccaaaataattaacgtactaatttaagccaaacatcatctattgacattcccccaatttaatatatttttcattcggatggttccctacaaaaaacacttaatcataatgttgtcttacctcaattctatttataatttacaaactttttagtaaggtgcaagcacttagaccattgtgcatatatttaaaactttcttgctcttgtagcctttatctactcctaattattttctcatatgtgtttgttcattctattcaactgatcatctgtataaagcattactgatataccatgaataaaatcccagaaattatgataacagttaatgccacacagccccagatgatctactccataccctgttgtctgcacaaaatctggatattcttctgctgccatacacaccccttcctgttgcaccggtgcaacttgggtataaaaataccaccaatcttgtgactggtggctgttaactgcttatatatagtatggagaaactatttggcaggcgtacgcttctcctgcatctctcgggtttcccctgtcattaccatcggcgtgtggatcgtacgaattcttccacctcaaatagtttctcccttactgtatgtctattatatagcttttattcttttttgtaaagaatagttttatttctcaataaacgattccattcttattcatcaatcttcataaatgtgataattgagttcttataattaggattatcttttgatgccaccaatcttaatactgttttaaatatttcatcattttcttttatttcttttaacaataatgcagtattaggtttattggcctctattatataatcaggattctttacaatttctccaaaataagaagaaaatctttcataatcattcgggtgtctgtccataatatgttgaatctgattattagttataacaacttcatctgttagtatatcatctgtgatacatttatatatttctttatttatcttaccaataggatgcacatctaaaatcctttcatcttttgtgctgcctaatataccattcttttgtccatttgcaatatttttaactcctgccttaaccttagcctctttaataaccttttctatgctctctggtatctcctgtcctttttccttagcaagaaaaccttccgcgaatgcttcatatggactctctgttgcatatttacttatttttgcagtttctatcttagcatttgcagaataatatgagttgatatcgtacttccagtcaccgttaatgagcttaccacctaaatcctttgcaccaaacacgcttgacttctgaacatagtccgcgttagcatgcctatgtatgaaatgaccatattcatgggttaatgtatccatgaggttctccctgactgccatacgctgtgtattcagctcaatttctgcctcagccttattgataactgccttttctctatactctataagagaatgttcggatttattaacaatatcagcatagttgttaatatcattgaatctgttagatatatatatcttgtcgtcaacccaattatatgtaactgtggcatctggcacttttgacggattatatacaacaccttttggcataatgccatatttgtccttatgcttagttaatgtatcttccaatacgtcaactgtatcaggtgtcattttcttagatagctttatttcctcaattgtaccggctttaataagcctattctgtgcttcattcttgtaaacctcctgcttatcaagcatatcaccattaagaacttctacctgctcctgcatcttctttctttcagtagcagactgccttaatattctcatatcttcatcagtgccagttccatcaatatatactttcttttcaagaggcttttctttttcaagactcgcatttatctgtttctgcatatccgcaatctggctcttgatattattaatctctgtcttagcagtagctttatcaaattctgaatgtcgtttcttccattcttctttcctctgcctgattgtatcttgatatttagaatcatttcttaagctttgtgcctgtttcctccttgctacagatatactctgtttttccatattctgaattttattatccgcatcattatttctattccatttaaacactcatccctgccatacctgatgcgtaggtcttgctgtctcatgccaacttacttctacataatccgtatgcagcttttccattttctgctctgttacctttgtcgtgacttgtgtaactgcagtcattatggctcgtcttgctgctacctctatatggctcgtccttccacttgcataatctattgtccttaacccagaattcgtcatttcatttatggttttttaataaccttaccatatgaaaatgcaccgctggttatctccatactgccccgtttaatgtatctttgtaatacttagttaatttacatcccactatgtatctattaattctttgactgcctcctgcttgtttctgctgcctccgttatttacatcccactatgtatctattaatcgtctttcctgcatatccattccatagaattttcttgtatttacatcccactatgtatctattaattcagctaggagattaacgcacaagggaaaaggtgcaaatttacatcccactatgtatctattaattcttgctatctgcagaagtcaaaaagaatctaggtgtcatttacatcccactatgtatctattaattctctttcataaaactcaaccggcatacgctctttcaaatttacatcccactatgtatctattaattcgtactgtctttaaaatctttccacgctccagttgtatttacatcccactatgtatctattaattccccagccgtttaaactatcccataacatgttgtatttatttacatcccactatgtatctattaattcccatctctattgtatttatccgccggcttatagaaatttacatcccactatgtatctattaattcgagagccgtacacgctcagtttcgttgtttttgtacagatttacatcccactatgtatctattaattccttatctgctgtagacacatggaagttaatagatgtatttacatcccactatgtatctattaattcgtttgctgtctttatatcgacatctcccttgtggttatttacatcccactatgtatctattaattctttcttgtctataaataagctgccgttatatgtcaatttacatcccactatgtatctattaattcatcaggcaatcaatgcaccgtactaaagataaaataatttacatcccactatgtatctattaattcagaattatggaagatttaattactattttatcggtatttacatccaactatgtatctattaattctcaacaacttcttgttttaagtttaaagtgatgatatttacatcccactatgtatctattaattccttgttatggttgtcaatggctgaattcttatctgtatttacatcccactatgtatctattaattctaatacagagtttacaggtgactttataattagtatttacatcccactatgtatctattaattccagaatatgttgatttttatagtacttataattttatttacatcccactatgtatctattaattcgtggatgcgggcatttgggaaaaactatatttaatcaatttacatcccactatgtatctattaattctaactgtcctaatgcttccatgaccgtttcaagcatatttacatcccactatgtatctattaattcctataatatatcttatctgatatatgaacatgaaaacaaatttacatcccactatgtatctattaattcagcggatttaatcttactgttttttgcaatagggaatttacatcccactatgtatctattaattctaaatgccgtcaacattaaaagctcgttgtcttcctcatttacatcccactatgtatctattaattctttaatgaaatatgtattattggaagtatttcctatatttacatcccactatgtatctattaattcttgacaaatgcaagatgtcaagtgaagcctgtaatatttacatcccactatgtatctattaattcaaggacagttttattatcatctgcatacacatctatatttacatcccactatgtatctattaattctctatgacaacttttttattgcattttatatctaatttacatcccactatgtatctattaattctgctacccatgcaagacctcttatattcttatccttatttacatcccactatgtatctattaattcatgctttaaatgcttgggttgacagtaactataacaatttacatcccactatgtatctattaattcctaaggacttagacaatactaataatacagaagttggatttacatcccactatgtatctattaattcaataatggctatatgattaattatactgctacaatatttacatcccactatgtatctattaattcgtgcatgagtatagacaaatcagatgaatataagagatttacatcccactatgtatctattaattcaataagaactttgatttgattaaggaattaggttgtatttacatcccactatgtatctattaattcctttccaatattatatatgtacctgtatagtatatatttacatcccactatgtatctattaattctgttccaatatcagaaattttttctatgtaatcacaatttacatcccactatgtatctattaattccaataactatgtgtctaaactaacagataataaaatttacatcccactatgtatctattaattcgcgttaaagacattaagccaagctataaatttactgtaatttacatcccactatgtatctattaattcgaacaccaagaccaagtatatttacgctatacattatttacatcccactatgtatctattaattcccgtaattattaaagcctctctgtttctcaactcagaagcgttattctgtctaccctttaaattcgccaacagattactaataatttaagccttgaatatgccagaagcatagcaatatcgccattgtcgactctgtgcatattttacactatttctggtcgacaatcaaattatgaaactcgtcaaatcatcttccttaccccaaaattctttatccagccatttttcactcctgcttttgaataaaatgactgaatccagattagtattaacatgtggtttcaactcacgtcgtaatttttctaattgaactgttgatatttctccttcaaagacagaattctgaatatgcgtcagatactttttgcagattttgaaaatatgtgaccatctcttttgcccattttcatctttactaacatcatatacaagtacaatatacatatactaccaccatattctaaacccttcatattctttctcacctattaaatgctttataagcttatatgcttctaacctcatcagatactgataagacacctgccttcccaattctttatgcattattgttttcttcatacgattctcaaattctgaaacaataagtttagaagcttctttcttaagatgaagatagttaagttcttttgtaaagctgtcttctgttatctgtcttctgtttaacaacgaaaatatcaatctgtctccaatcaatggtttaaatacttccgatatatccagacataatgaatatcttcttactcccggttcatgcagataacttatcgttggattcagttgtgtatgatatatctcgcttaataaacgcgtatacactaaggaattaacaaatgaaatcaatgaattaatcatattgtctggcggatgcataacacgcttatcaaactgtatatcctgattaacaatcacattccacgctgcataatatctctttcttatatttccttcaattcccatcaattcttctattgtccttgctttacaaagagttcctcgaagtgaatctatatccctcatatattccgagacatctttttctcgaccattataatatctgagatttctatatatattatctgctgccgcctgtataaattttatggcaatatccaatctcttatcataatacacataatgttcaacctgcttaaccaacaactgacctgccggatttccatcctttggataaaaacttcctgaataataattgtaataattaaagaaatgtataggtattccatactgcgatatataattaagaaatgtagtattaaacgacatttcagacattacatatatatctgaaattctttcaattggaatatctcttttttctccgtcataagcagtgaactgtaatgtattatccttgcgttttaaatccccattattatacacataaaaactctgtttcaattatcatcaccttcttctgtctatataaaacataaatcataatatgcacatttttcgcatatctttttctcttccagcttcggcggatactcctgattcttcacactaatgatttcttttataatatcgtctagttttttacagtcctcatccgacaattctacatcaacatttttcttcagcagcggatagtctatcacgccatgaagtccatccacatttctttttttcaggtaatatagataatacttaacctgccatattccagcctcttctatactcttgctcttctttatctcatgaagttcatttttttcatgaataaaatcaatattaataatgccatctatttcaatatgcttatcatcccgcttgtaactattctcatccagcaattttccaagctgcacattttcattctcatcttccatattaatctgatgacaaaaataccataactttcttgagcacacgaaataataataaatcatcactcctgttattctttcttccataaaatgctcctatcgtatgaatattcagacaaatatatctctttcatattcgcctaaaaataaccctgctcctgttaaatccacaacattgaaatcgtacataatacatgatctatgaatatcactaccatatattacatcacgatctatcccatccggatatttcttataagcatataactgtatagaaatcacatatgaatccagctttgttcttgcgtcattcttctctcttctatcagcatcagagctatgcattatatcaatacactcgcttataacttcacgattatcttcatatacgtcatcaggaataattttaatactgttaatatccctgaatttttcatcagcttcacttttactgtattctgctggtgtcagttctttaaacattgcaagaaacttctctatatccctgtaataatccgtatcctttatctcatctgtacagtatactttattgatatattcagatttgtctgattctgtcataactctgccaatatatttttctaaacactcaacagaacgagtgtatatctcacgattatatatagcccggctgactcctactccatttgcattaatgtatatatgtatattggccttatccggaatataccgacctttcctgttgcatcttcccattctctgcaacaaactatcagccgtactcatctctgtatacaacacatcaaaatcaatatccagacttgcctcaactaactgtgttgttacccatattcccgtttcattttcactatctgagaactttataatctcattttccagcattctcttatgttctttggtaaatcgtgcatgcagaagatgaacattatctgttttttcggtcaggcttttatatatctgctgtgccttttttaccgtattgcatattacaagaacctttttaccatagctatcttctacaaccctatctatttctatatcgccatcttttatatctatccaatgtcttttaagatccgataatgcagaaaaatccctgtattcatactgattatcagccatcaatccatatttatgcataagacttcccaataccggtggaaatgttgctgttattatggcaaatttcccacccatatcagtcactatctttaatccatatattattgctgctattactgatggactatatgcctgtatctcatcaataattatcttagaatatttcaatatagctgcaaatatttctgttcccaacgccttatacacaaacttaaacaactgatctactgtacatatagtaagcggctgagataataattttgctttctgatatttttcatatccatcagaatctgtttcgtttacctggtcttcaaaataataatgcatactgtctgaatgaagtattgccacgtccttatattcatacctgtctcttattctttcatatattgcattcgatgatactacatatggcaatgtataaaatcccttttcaccattaagccataataatgatgcctctgtttttcccattccagttggtgcaaccacaacaagattcttatcacatttatctctcatatactcctgaactggtcttaatccatgctgttgaaaaatgttttctatagatgttttaagatattttgttgtgaaatcagaacaatcctctgcttctgtataaccagcactcactgtataatcaaatttattcagcagacctttgattagcacgaattcctgccattcatgcaaatattcattcttatcataacagctcatgatgtatttgtttcccgatatgctgcctgtatttctgaacagaagatatttatttatacccgaaaccttagctttgatactttcatcatttaaaaaatcccttatatatgggttatagtatttcttacagaaatttaatattatatcatcaccgtttttatcttctctgacatgatgatgatatactgctgtatagaaagctttataatcatcattatctgcttctggtatatgattcttaaattcttcaggcgatgtagtcattgcacttaaaaatccgtgtggtatctcctgagtctttattacatccagctctttatttatcttagattgaaaaacaatgtttgcctttcccaggtcatgcactctgcatgcttctattattattgctttttctttttctgtaaaataatgtccgaatttttcaaaaaaatcctgtgcacatttaactgtatcatccagatgctgttttaatgtcacctgttcttctttagaacccccattcggaactgactttgcaaaatattccatctacccctccatacatttaaatccacaatgtaactattaataaaatctcatcacgcaaatattacaacatcttcatcatccgtatcatctacatacgctctttccaggcatttatgaggcgggcagtaatatgccttaacccttccaccttctttttcagacttccatctccttaacccctgtttagttatctcatattctttattcaatgtataaacagttgcttcaacaggttcttcccccatgtaagacactggaatatacatatcgtgattagtcagtacttcttcatcttcttttaatgaaacaattctgacatctcttatatctataatatcctcatatcttccaagagacagatatgttggcggattcttaagtgcctgatatattatttcaaaatcagcctcatcctctggcacaatatgtattatgagcttgcattcacataacagttcaacattggctattcccttaaatattccataattaccgccatcttttacgcatatctgatgcctgccttcttcatatctggcacctgctgaaaatgaatagcgtgtatacagatctgatatagtccctttgttatcgccctgaatactcagcttcattttgtgatactctttaaatccacatgcggcatgtatcattccacttactgttgaatatggtggaagaggataggtctctttaattataaaactgctcggttttctataattaacaagattctgaaaacaatccagtcttattgctctatgcatagtactcatccactttcttcttaaactcttcaaatgcttctgctattgttacagccccaagtttttccttaatctgactgtcattattaaagattcctgatgttactcctactattgtagaattttcaagatcttcactgctttctttcatttctaccaatgtatcaacatttatcatattattatcaatcttaactatgttttcaaaaaacggattctttctttcatagttaccacctatgataaataatggagataaattttctctcctgccgcgtatatctctataaagatactgaacggtttcaagaagtgttttaacccttttagctttttcctcctttgatacattaatctctccatcaattccaaccctgtcaagatccactgaaattgtatatgcataataagaacgatgaatttcactctgtgcaataccattgtcaagattctggcgtttagctaatcccatattagtaagaaactccagctccccctgatatggttcaagtgatatggcgttgctaagtctagccactgcacttcttgttgatgcacctccccttgcattatcgtcctttgccattgtcttcatataaccaaataaatctatttctgggtaatcctcaatagtagctgatggagcaaactgtacaactccgctcttatcctcgacaggtgtgttatcccactcagcctgctgtacaatattgtatcttattgcctgccttgatatatatgaatactggcttgcattacctcttgtcattttcttaatattagaaatattacctaatccttctccataattcgcactctctgcaacaaatactattgtcattgtcaatccgttcttactcatctaaataacctcctcattcttcttattctgtctgcaaccttttaatcccaaaacaaatgcatatccatattcttcaaataactcctgatttttctggatatatacaaactctcttggaataactaatttatcagcctgtcccacttcagctggcaccttacaggtacaatataatctcattacaatatccagaaattttcctgtatttctcgtagataatgcattaagaagctgatatattgttcctttgatacattcatcatcctttgccccttttgaagacaatatggcagttcttaaagcaaaaccactatccattactgttatacttcccatttctataaccttacctccatttccttgcaaatccttatctttcttaacaagtgcactatacaacattacaacatatatccaataagccgttactatctgtcccgcattatcagaatcaagattattctttagcactttctttagaagcaattcctgacttctatgtttcagaatattcataactacattttcgtatatattaagataatctgctccaattcttgtgtaaggatattctcctaaatactctaaagcttttcttaccttttcatcattaaatgtctgaagtgcttcattacttattacagaaaagatatatttatccttctcatctgttccctttaaaataacctgaatattgttaagctgttcaactttacaatccatcaactgcttcaacattctggcaaaccattgtgtatatcgctcagcttcttttttctctgcctctgtcacaatctttccactcctgctattacaagccagtaactgattaattgatgaattagtattcataaatgcaaagcgctgtcctaaaagtgtgaatcccagcggactggcagcatatacaaatgcgcatgcaggacacaaaaaggcatctactttacaattccagaatgcagacttttttctcgcaagatcatctgccatatccttcataaaagcaatagaaacacgttccttatttcccattggtcttccacagtctatacacatatccttatctttatcatgatttgtcctgatatattctttaaatggttttgtaaaatcctgttcaaacaatatacgcatgtccttctttgcattagctcttagcagaaaacatttaccatcccagaaacggttaatatagttatatatgacgctcttcattacaaatgtttctttacactttggctgcattataaagttcttgataccttcaagcctctgttttagttcttgtgatgttgatttcgcatttaatttattttgctgaagattcacatatatctcagacccatcaacttcgtttcttatattttcaaatccagccttataactattggacaaaagcttatcatttataaacttgatatcttccttatcttctttaaccagcttgtccggcttccattggtcattatcaattttgcatataatcttgttaattctgtctaatattcctttatatactgtagaatctccataatagttaacacaggcatcaaaatacattccagtccagtcacactgctgcacgaaatcctcgtcaatccataatccctgctcatacagttcaagcccatctaccggtctgttctgcatttttatgccataatcctttccgctctctgcatctgacatatccagcatatagttaagacctactatccccgcatttttcaggaaatctcccatagttaccagatatttacccacattctgtccctcctttcctaaaattatagtaatatttcgaacttaccgtgaccttctgatcttctggctcccattcctgcctgataaagaatattaagcagctcacaattacctctaagcttatatattccaaggttagcatccacctttcttccaaagcagttaactactacttttcttgctttgacaggttctattgataatccttctgtatcaaccccgatttccattttctgaatgaaaatctctacattttcacataatgcctttgaaaatccttcatctgcatatgtataataaatgtctttgttagtcacactgtcgtgccgtcttacaatcaatggactctgcatctttacaataatttcatcatcaacaatatctttacgattgtttgaccttattgaaatcaatttcatagaattgccactgacaggatactgcttgtatctcataagctgaaaagcattaaaccattctataatctgtcccatatcagcatctgtaaaaaaaactttaaatctgttgtccctaagaaatatagtgtcacctttaaataccgcacctggcagatatgtactgaatgtaaatgatttaataattgaatgctccttattatataatcgctcaaacatatcttccgaataattcctgcttgctgcttttaagaaactaaccatcaatctctcatattccagcggtaactgtggcttttcaagttgaaattctaaagatagctgtatcattgtatcacctccttttgcttaattatgtagttcatatctggatattactactttagatttaagatgtcaatataaattatcaatttggattaaaaaactttgtttgatttttaatgtcacttattataatatacatatataatttctacattttgggatgtaaataattgataattaatataatcaacttttaatagctacattttggaattctcccatcccccaaacctttccattgttatttccaatcccatatattataatttttcttaaccaaacaaatgaaggagatttatttaatgaagaaaactaatttttggaacagcctgccgttcaagctgatggtagctgttctggctggcgttgttatcgggctggtgctcagttcgacggatggcaatgcattttcaaaggccatattaaatattgtggtgacgctgaaatatattcttaaccagattattaatttctgcattccgctgattattatcgcatttatcgcgccttcgattacacagatgggtaaaaatgcgtctaagctgcttcttattgcagtaactatcgcatattcttcatctgtcggagcagctttgttctcgactgctgccggatatgcgctgataccacatttgtcaatttcatctacagcggatggattgaaggaactgcctgcggcagtgtttgaattgtcgattccgcagattatgcctgttatgagtgctctcgtgttctctatcatgatcggactcgcagcggcatggacaaaggctgagttaatctctgacctgcttgaagaatttcagaagattgtgcttgcaattgtatcaagaatcatgataccaattctgccatttttcatcggactcactttctgcggactctcatacgaaggttcaataacaaagcaggttcctgtgttcctgaaaattataattattgtattaatcggacattacatttggatgactctgctttacacaatcgcaggattgtattctaagaagaacccgattgaagtaatcagacattacggtcctgcatacttgacatcaattggaacaatgtcatctgctgccacactcgcagttgcactccagtgtgccggcaaatcaaaggttttgagaaaggacatggtctcttttggaattcctttgtttgcaaatatacatttgtgcggctcagtgctgacagaggtatttttctgcatgactgtatcaaagattttgtatggcactattccatcagccggaactatgattttgttctgcgtgcttctcggaatatttgcaatcggcgcacctggcgtacctggcggaacagttatggcttcgctcggacttattaccggcgtgcttggatttaacgacactggaactgcccttatgcttacaatatttgcacttcaggacagctttggaacagcctgcaatgtaaccggcgacggcgcgctcacacttattctcactggctatgcagagcgccacggcatcaaataaggcgctgacaattaatatatttctttgacatatgtaaagtgctataatcatcacatgaatacacgcgcctgcggcgcagaaatgaggtaacatatgccatttattaattctaagataagcacttctcttacagaagcacaggaatctgaaatcaaaacacgtttaggtcaggctatccagacaattcccggcaagtcagaaagctggctcatggtcggcttcgaacctgactacaagctctacttcagaggaagcaatgccgagcctatagctatggtcgaggtcagcgtttacggcagtgagaatccatctgccttttctaaactgactggccagatatgtgacatttttaaagatgttcttggaattgcaccagatcatgtatatgtaaaatatcaggctgtttctaactggggatggaatggggataatttctgatatgttaataagcgggacactcatttatttatgaatgtcccgcttaaatatttttctaaaactctttcttttccataatacggacactaattgcataagagagcagtatgagaagtactgtcacaaccaatgcaattcctgcaagtatccagccgttcatctggttcaaaaatgaaaaggcacttaatacatttgtccttaccagcttcgcaaatgcaatcaacaatgccgtaaccggcagaaatttttgcgcagctctcctttattatcaatgcatttgcaatatactaacacattaatcgtatatatcatataccttaaaactctctcctcttcctaatttctgcaagatacttactccaagtattcttgttgcaaaatatgcaacaattgcatcatctgtactaaataacctttccctcgtttcatcctgattaacctcatgttttgaacgattatatatctgtacaaagtcatacaatgcctgtattacattaccatctaacaactttttcttttcaattctatgcactgctttgcctaatgtgcaattagaaaatctaaattcatctaacacgctattcattactagcaaacgacacgctgcttcaagatgcatcccacacatatctataatatatcttgcatttaccctgccataacctacatctatttcttcttttgtatactgcaatggtcgatataattccctctctatccctgctggatatggatttttagatgaactcgaaggcagacaataaccacctactcctcctattaaagcatctattttccataacatatctgtcttatacttctcatctttattgtcaaaatcttgtcttaagaattcgcttattccttcttttacagcttcatcaaacagtttattgtacaaattcattaattctttatgtgatatcatctgtactccctttcatctatcaatacagttcatatgtacaaatcacaccaacattttatcgatacttcataatccaaaatgttatcacagccgaaatcatcattaatacaaatataataaatagcgcaatatacttccccttttcttcagccaatttaataggagccctgtatctttcatcaacccttgcatctctttgttcattcatgatattttgatcagcttccaaatctctcagctgcatatattcttcataatgacattttcctagtctttaatatacttcatatcgtctaaaatcattacagtttctttatttcactgcatactctttcaattttctttctgagttcaattctctgttttatatcatcaagattctgttctgttatatcaatattattgataatgctaatggcatctttttcatattgttcagtaagttcaattatttgatccgttaatgaattctgtttgtttttctcctcattcttctttaccagtctgtatctgcctctctctgtacactctattgtccctgacactgtcattgtcttaatagccccggcaataactccttcagataattctttgtcataattatccctcagatatttctttatatcagacacttcatgtatcttgttatctgataaatacttcataatatagcattttgtctctgtagttttactcataatattacctccaggttctgttctaacattctgcttatattgttaatgttattataattcattattcttccatggtcaattcaatctttaaattcttcattctttaattttattgattgatgcattattcttcaaccatatcaaataaattaatctgttccgttttaaaatcagacaacaccatcttcttcacttcttcgcccttaatatgctcaccttcaactctttgaacgccttttcggatattagaatctaccagtttcaatacatatatattgtcgaatctgttatatattgaatctccgcctaatcctgataagcatatgagctgtgtgtttgtcttctttgccatctccatcaaaggttttaacaaatgtgctgaataagtctgggcaaatggattgtccattataagtaccttaccttcctctgctatagagaataaatcactttcatctcttctcatataactaagcaaacatgtaagaataacgaatgccgacaagaagccttctccacccgaattggatgaaacttctgcccatgatatcggcacttctttttcagcctcaattttatacaattttattttgatattactaataccaataacatagtcatataaattttttgttgatatagtattgcctaaatattctgtaagatttttattattctctatcgtttcaataccatgttttacaaccctttcaaagaaatcgtgaagctgtatcctgtaatgttctttctcactatcccagtcaggagtctggattcttaacattttgatatttcttcctcttacatttatagtagaattcttatctatcattgcaatattggcattaacactttttatgtattcaaggaacatttcttcaacatttttctgttcactatcaatatttgccaggtcaattgtaagtttttccaactgactttcataagcagccttattaacatcatactgcagtgaaagattatgaggattactaatctgtgccaaaaggctctcaaatgttttcttaaaataaacatcctgatattcattcataccttcaatatttcttattgtctccgagatgctattctgttcatttgatagtttctcttttgctttagccagttttcttcttatttctacctgatatctgtctaaatctgatttttcaattgtaagtaaatcaggaatctcattgaatattcctgacattctatcttccgatacctctggcttaacatcggaatattctgacactccacttaatttacctgataattcattttttcttgatgaaaaactttcaatttcttttcttataacactgatatcatgcttcttaagattcattctcttatcaaattcaacatctgtaattaactcttttgaaagtaattctttgtatcctgttttttcttcgagctgcttatatccataatcaatatccttattaattccggcaataacacctgcaagtctatcattattttccattgcagcattaagtgctattcctgttttgttaatctgcatttccaactgatcgtactgttcatcagaaaaataaacatttttatactcatcttcaacaatatcattattgctctttttagcaagatccttttctttattcgacaccctgactgtaagtttgttcaatctttcattaagttcatccaaagaatctgacacagctttagtaagtgcattatatttagcctccagttcttcaggtgcaacattaatacccatttttgcagtttcacactctctataagaactaaactgttccattttaatgttatttatatctattgcttttttgaattcagttcttttggctttaagattcattaatatatctgttatctcacttatgttatcatcaatatttttattcttcttttccaattcctgaagttcttttctgacacgaataagtgaattaacgttcacattataactcttatatttattacataacttatcaaattcctcagcccttatattatattttattatcagattctcactttgcttaattaatctgttattatcttcattttcatcagataatgtatttttttcacttcttatctgtatctgtctttgctttaactgtgtctcctgttccttatacccagctattcttttctctgtagtttcatatagttcaatactaaatgtctgattttccatttcaagtttatgtttactgaatacttctatatcatcattctttgactgtatctgagtattaagattattaattctgttctggatatcaataagcattttatccagttcagccttatccagcagatgattattaaacattataaaaaaatgtacattaccatatgttgtaaaattatctttaactttatcaaatggcatttcaagttcttctcttattattattggtatcggaaaacttgtatatattttttcatcaataagctttattctttcaaatgcatttttatccattattatagaataaggaatgaacggattattttctacaagcttagcattactctcctgtgttcttccattcttattaagccattccataccatatacatatctgatatcattctgcttgcaataatctcttatattatctggaagttctattgtctttccttcttttaattgcgcatactgtttttccagtacactttgtgacataacaagtttcttcttatcaatttccaactcctgaatcttgttcataagaccgcttataatatcattttttctgtccagatatgattcttccaatccaacatatttaataattcttattctgctatttttctgatgctcaagctcagtcaggttatttacttgttctgatattttatatttcacaccacttatttcagctgcaatatccacttcttcctgtgaaagttttcttgcctctatatccagttcattctttttcttatataatcttgaaagcctgttattctcctcctgcttctccgcatcaaactctctccgtttaacttcaagtgtgccatcttcatataacccaagaatgtttctctttatttcacacgaaaattttctgttaaatgcttcttcaatatcattatacgaatcaactgaattctgcaggctgcctgtttcaatgcttttctcccgtatgattctattattgtcctgtttctcagtggcaagcatatttaatgaattttctttatctgatatatcattatcattattattactttcctgaacaattctttccgactccaaagaataatattcatataatgtatgtccgatttgttcaatcttgtccctgttattctcagaatcctttaaaagtatttctattttctcttcaacttctgccttctccgcttttatgtcttttaattcctgatacagtttactacagtcatatatagataactgccttgttaatttatcttgtacatgtttaaatcttgttatttcaccttcctgctcacttctttctaagacaatttcatctttgctttcaataaatttgtatatttcatatgacatcttttcatacattatttgattaattacatcttctacctctgaaagcagtctgcttttatcattaagatttactgtaagaatcccaattgcatcatttaatttcttcacatacgctgccattcgagcggtatgttcgcatctgtcctcgtctaattttacatatctatctatatcttctttaagagatttagtatcttcaaaatattttctataagtgcttttttctctatttttgactgattactcctgtattgctctataaactgaaatgtcagttttctgaactcatctatcctgttcttttcctgattaagcttgtcctctatcggctttaaaaaccagttttcaacaagatctttttcatctttagaattactaaacaattctgatagaccagattctttctgattaacctttcttataatactttcccattctttattattaatctgatactggcgcaatgtcccaaaatactgtcttcttccataactgctgcccatatcgtaaattttgaaatctccatctttatctttacttatatcttcaaacagatttttacattccgtaaacccctttaatttttttctatttccatcctgttttacaattggtatattatcaatatcataacggcatccttcagaataacttcccgtaaatgtatacatttccagttcttcggcatcgttatcttctttctgactcttccttaccatcataccagtcaaaaatcttgtaacattattatcaagctgccactctgtcataataaatgtaggcctgtttgttgtaaaataactcttaaactgtctgtccccaatatctctataagacttattaacaaactgactcataatcatctgtacaagtacactttttccaccaccattgcgcaatgatattaatgtgctttctccgccaaattcaaatgtctcatcatcaatttttattgtgtcatgattgtatgaaagatttagtattctgattcttgaaatcttactcattttttacccccagtgcttccattattctttcataattatctttatttaaaatcttatattccattatattatccagctttgatgtagtctttatcatttcatcttcttcaacaaaaacaattaactcctgcttctcaagaaatttgcatattccacttacaaatccttctttagtcgtcttcatcttagtattagtttccacgctttttaatgcctcataagcttcactcatgcttttatagtccaacacattttcatataattctgtataaatattgccatcttctgcctctcgttcattctcaaacccgacgcccgctttaagtctctcagatataatattctgcaattctcccagtttaagaaattctcttgatttacatgagctcccctgaccatcatagaattcagcc

SEQ ID NO: 8499 - DNA, 934 bp, Unknown
  gut microbiota DNA sequence
gactgcggactaaatatttctattggaacatttattgtaatacgattgattgtaaggctggttatgatgtttgctgtatttgcagttacatatgtatttagcagccgtttttctgaagtgcgtggaagggctgtcagtgtactgatcatagtagcggtgattgtgcttgtggcagtaacgggaaatgtcagcatatggtgaaggaggctgatatggctgagttaaaatataatgatgagaattttgatgatgactttgacgatttcgatgattatgatgacagatttcatcaacaaatgaagttgactatggtacttcttccatatatacacagaaagatatggaagatgctgttaaagttataaaaagaaagtttaagcatatgaagggatttgaacttcataaagtctattttgtagatgacgaattctccgaaagtactttgcaggcagtaaatgaaaaaggtaagaaacagggatggactcttgcacggagcgatggcggcaagtggcggataatatctgaaggatattaaaaaaaggcagaagatttccccgaattatcttaggtagttcttctgcctttggctgtataaagttctatatattgttgtgtgaattattccgcatcaccgaatattacatgtcttactggtgtaagtgcatataatagtatcattccgatgattcaagaaggataagaacatgcatggtttcggaattatgaatataagagatattattgataaatataatggaactatcaactatgaacagcagggagataattatctgatgtgcagatgcacattagaaaaggtttgtcaatagttttttgataaataaaaatgtgcagaatatgccatatattaccgaatatgccaaactacttttttaaaaaattaaatcagctataatcaatgtataaagtgaaa

SEQ ID NO: 8500 - DNA, 129490 bp, Unknown
  gut microbiota DNA sequence
atattttattccagtatttaaaaatctatccctaataaaaaaaggtttagcaagaatgcgtggggtaatttattgttttgcaacaaaaaaaccaattaaaaaaatacgtatatatgaaaatgttgaatttaaaaatatgaaaaatataataattggaaataatacgacaatagaacatgattctcaaatgtatgtgattaattctgagggagtcaaaggacagattttaattggtaataatgtacatattggaccatataatcgttttgcttctgcatataatgttgttattgaagatgatgtcctttttgctgcatatgttcatataacagatcattcacatgaatatagaaatattgaatatccagtccataaacaaggaatattttcaaatggttctgtccatataggagaaggttcatggattggaataaaggcagaaatattatctggagttacaataggtaaacattgtgttattggcgctggggctgttgtgacaaaagatgtaccagactattcagtagttgctggagttccggctaggattattaagaaatataatttgagtacaaatacttgggaatgattgacttaatcattatattaattttttatttgaattaaattgtctttaattcctacagataaggaaagtgttaaataaaatagtatattaaaaaatgtaatttgcgagatttaatagattgcattttttatcgacatgctcctttcagtgcagaactaatgagtgaaaggtaaatgcatccacatgtacctaccaataggcttgaaaatttgatataacattaataaaatcaagttgtatttattaatggaattactttagaaattgataataatgacattatcagtatttatgaagtaagcactaaataaaaatagtggatttattttcaccaataaaccattcataattagtatatcaattaaataattatggaggttggacatatggcttcgtcaccgtatttgcttgaacagcgttttgaatttattacagattgctataaaagacaggcaaaactgatatgcataaatctatcaatgctttgtgtgccattgtctatgacatgatgggacaggaaataaacaggaattctatatatatgttctgtgttacacgatgcgacaggataaagattttattaaaagaacctgacgggataacattgctttataagcggcttgatgtgaaaggaagatacagatggacaaggaattcatcggaagtaaagcctatcacatggaaatggtttgactggcttatgtccaggcttgatattgaacagcctaaggctatcgacagtataaaataaccttcttatatgtgtaaaaatgcagcggaatcctctgattttgctgcattttctgtacatttatggtatactcctatttttgacgtaaacgctccaacccatgtacctacaaatactccgaaaaatttgctataacagtaataatccagttgcacaagttgtacaattttaacgaattgtacaactagcaaacaattttgaaagttataattaccgaatcatcactaattcagccacactagcgtaccgtctatccgcaacaggataccttctgttcgttaaatcatactgttcacttcatatgttagtatgattagatataaataaacatttataataatctaaagtattattagcatgggcagattattagttggcgttttgcttagatttagggtattatttgataaataatatgaaagagaatggtggatacaaatggatgaatactcaagaattataattgaagaatactgtacgatgcagttgtcacaattgatttccagagagaaaaatgctgatttgcaggaagcattggaagatttatatgaatttatgattggatattaagagataatctgattcgacgaaaaaacaacagatgacgacgcaaagactacagaatacgacaagtatatttacacttttctatatatatgatactgtacatatataaatgtgcatgtttattaattaagaggaggaagtaacactggtgttgtaaatgtattatggagtttggtgagaagaaggattattatgatacagccatgcgtcagattaaaggggattcatggagcctgagtgcatatggttatcttaagagtaatgaagaatggattgggaggtatgaggattttctgaagggaaggaagtcacttccgttattatatgatccgttctttaagaagatatttaatccggttgagagaagggacaggctttcagagctggtgagttgtctgctggggcagaaggttactgttcttgaggtgttccctaatgaggattcacagttccttggtgtgatgattattatggatatggttgtgatgatgtctgatggaagtattgcaaacattgaaattcagaagatttcttatgattttcaggcagagagaatatcgtgttactcggcagaccttgtgttgcgccagtataagatgattactggaaaccgtgagataggagatgctggtgtgcttaggggttctatgaatggtacgtcaaaaccctcatataaggatatgcgaccagttcatactattattctgtttgagaacagcagcagcagtcttatcagcgagattgatgaggcattatattttcatgtcggcaaaacaaagtttaatactggaattaagataaatcttttgcaggattatgtgttggtaagccttgacacatttaagaaataccgatattctgatattagaaaagggcgtaccgaggtgacggaatacgattatgacagaacgcagtacagtgaaaagcaggtgactgagaagatgaagcttgaccgcctgaagttcctgtcgttatttgtagccgagacaccggaggagatagagcagttgatagagatatttcctgacttgcaatcagtacgtcttgatattaatgagtatttggagagaccaaaggaggtgctcagtatgttttctgaggcgttaaggatattagacaggaatacggcagagctgatggttgacaggatgaaggatgagattgatgtgttgaaggtgcaggcagaagaaaatagggcacggttagaagaaaaagactcacaattagaagaaaaggatgcagaaatagccagattaaagatgttgttagaggaacagaataagtagttatatataattattatggatgcagttatcatgatgtgtggtggctgcatcttttaatgtggataatataatcaggtagaaatgcctattagaaatctatattgtgtgtgtttcgtaggtctttttgaaggataaagtgatgagtttgtgggctttttggcggagaaaacaagtatgtggggtggaaaagacatacgaaacagatgaaatgcggatatttggtaggttttaagaagtatgacattgagaaagcttgagaatgaaatgaaaaatattctgtttgagaacagtagtagcagtcttataagtaaaattgataagtaattatgacatcgcataaaaaagcagttaccacattaattgtgataactgctttttctcgttaagaatatgaattaaaggtcgaatccaaagtatcttacagcattgttgtatgagataccttcaacaatcttctttaatgccttctcatctgctgggtattcaccattctctacccatccaccgataagctcacacatgattcttctgaagtactcatgtcttgtgtatgagaggaagcttcttgaatctgtaagcattccgatgaagttaccaagaagacttaagttagcaaggcttgtcatctggttagtcataccaaccttatgatcattgaaccaccaagctgaaccctgctgaatcttgccaacagccttagaatcctggaagcatccgataactgttccgatagcagcgttaactgaagggttaagtgagtaaatgattgtcttaggaagctcatctgtagcgttaagtgcgttaaggaactgagccatctcagcagagcagtcatatgtattgatgcagtcataacctgtatctggtcctaactggtcataacggaatctgttattatcacggattgtaccataatgtaactgcattacccagttacgcttgttgtattctttacctacagataccatgaatgctgtcttgaacttgttcatctcttctgtagtgatagcagaacctgagaatctcttagcaaagattgcttcgatttcttcttctgtgtatggcttgtacattacatactcaagagcgtgatctgatactgagcatcccatagaagcaaagaaatccatacggtttctaagagcatctattaatgaagcgaatgaattaactttaattccgcttacattagataatgtctcaaggtaatcaagatattctggcttttcaatgttcatagccttgtcaggtctccatgcaggaagtacctgtacgtcaaatgtcttatcatccttaagaacctgatgccactcaagtgagtcaacaggatcatctgttgtacaaactaatgtaacatttgactgcttgataaggttacgaactgacatagaatcttcctgtagctttgcattacagagattccatacttcctcagctgtatcgccgttgagaataccgttgtatccgaagtatctctgaagttcaaggtggctccagtgataaagtgggttaccgatagccatctcaagagtctcagcccatttctggaacttctcgcggtcagaagcatcacctgtgatgtacttctcatcaacaccgttagttctcatctgacgccacttgtaatgatcgccaccaagccatacctgtgtgatgttctcgaactttctgtcttcagcgatttccttagggttgatatggcagtgatagtcaagtattggcatcttagctgcataatcgtggaataaatgctgagctgttggagttgaaagtaaaaagtctttgtccatgaactgtttcatgattcataatcctcctgtgaattaaaatattgttgtgttgcgttttattatatcagcggcgatgatactgtgattgtcagcatcttcaccggataaaaccttcattagcacgcttaccgcgcatgaggatagttcctcaactttgctgtcaacagaggtaagctcaggttctgtacacaatgaaagaacagagttattatatccaataacctctaaatcttcaggaattctgattccgtgggtatgtgcaaacttgacagcaccggcagcgatagagtcatcagatgtcataacggcatcaaacttcatacttttatcatatagatatgtaagataatccctggcatgagatatgttcttgccacacagatgatggaattcatccgggagagtaataccggcttcattaattgctttaagatagccgcggtacttattcatgccactgtatgaagtactcgtatataagtaaactatattacgatgtgaattatttatcaagagttttgttgcattgtatacagcttcttcatcattgcacattactgaataaatgttgtcagcgtccagatagccgttgaccagaactataggaacatctttagctgcattaataatgtagtcgttattatgctcactggtattttctacaaactgtgaacctgcaagaataattccgtcaactcttttactcaaaagaagctcgagataattcttcttattattataatctttaccagtgcagcaaagaatagagtcgtagttgtatttgcgaagctcctgttcaagatagtaaacagcgttggcaaggtatatatcagatgaatctatgcacataatgccaattgtcttcatagtattaagacctaatcctcttgcaaatacattaggagtgtagtctaattctttcattgcattaataactttgtctcttgtcttttcagaaaccctggtgttgccgttaagaacccttgaaactgttgctatggatacaccagcttttttagaaacatcatatatattaatattcatgtgcgacctcatctcttgacgaatgtaaatgtatcgcttaacaaaaatcaataaaaaatgaataaatgtaagcgcttacatattgataaatgaattatacaatggtattattataaaaacaagtgtaatgtaagaattttttaaaaagcagaaaaatgtattgacttagagcatttttaagtatattttatttatgaaagcgcttacatgcacttatttacataccatttactggttaataattagggaccgttatcgtaaaacggattattcccaatgaaaaaaggagatttaagatgcagagattaaacaagagtattacacatgcagttgacagacctgttaaggttatgcagttcggtgagggtaacttccttagagcattcgttgattatatcttcgatgtaactaatgagaagacagatttcaacggtggtgttgttatcgttaagcctatcgagttcggtacacttgagagattccatgatcaggaatgccagtatacacttcagttaagaggttttgttgatggagagcctaaggaaatcacacgtcagattacatcagtagtagatgcagttgcagctattgaggattatgacaagtacattgagtatggtacaagcgagactcttagattcatcgtttctaatacaacagaggctggtatcgtatttgacgagacagataacgatcctaatgcacgtcctcctaagacatacccaggaaagcttacacagctcctttacaagagatatcagaagttcaacggagcagcagataagggacttatcttacttccatgtgagcttatcgctgataatggtattgaattaaagaagtgcatcatgaagtttatcgagctttggggacttgaagatggattcaaggattgggttaacaattattgctcattctgcccaacactcgtagatagaattgttccaggatatccaagagaagacgcagctaagctttgcgaggaatggggatatgaggatcagcttatcgacagagctgaagtattcggtctctgggttgtagagagtgattctaatcttccacttgagcagcttgagaaggaacttccattcaaggaagctggacttaatgtagtatttactaaggatcatcatccatacaaggaaagaaaggtaagaatccttaacggatctcatacatcatttgtattagcttcattccttgctggtaatgacaatgtagagaattctatgaaggatcctgtaatcagaaagtacatggaagagacactttacaatgaagttattcctacactttcactttctaaggaagattgcgaagagttcgctaaggctgttatcgacagattccttaacccattcgtagatcatagattattaagcatttcacttaactcagtatctaagtgggaagctagatgtttaccttcattcttgggatatgttaagaagtttaacaagcttcctaagtaccttacattctctatcgcagcacttatgagcttctatacatcacagacagaagctgagtttaacggaggtattgtattaaagggtaacagaaacggtgaagagtacaacatcacagatgacaaggctgttcttgatttcttcagagataattcaggaaagtctgctaaggaattcacacatgcttacttaagcaatactaagttctttggtggcgaggatctttctaaggttcttaaccttgaagaagttattactgagtacatcacagatatcagagaaagaggtatgagagcagtagttaatgatttagctgactaattaatagctctttgaatgattatagagcggatgtttttatattcatccgctcttatttaatataataatcaaattgaattggaggatatatgcaggattttattaagattaataaagatgataatgttgctgtagcattaaagcctattgctaaaggcacaactcttaatgttgcaggaattgatgtgacaactgtagaagatattccacagggacacaagtttgtaattaaggctatcaagaatggtgatccggttatcaaatatggtttcagaattggatttgcacaggctgatattccagttggagcatgggttcatactcataacttaaagactggtctcggtgaattacttgaatatacatatgaaccagagggacataaggatgttgagcctactgagccggcttatttcgatggatatatgagagagaacggcaaggttggtgtccgtaacgaagtatggattgttcctacagttggatgtgttaactcaattgcaagagcaattgaaacaacagcaagagctaacaagccagaaggagtagatgaagtagttgcatttactcatccatatggatgttcacagacaacagaagatcaggagaatacaagaaagattcttgctgatttaattaatcatcctaatgcaggtgcagttcttgtacttggtcttggatgtgagaacagccgtattgaagttcttaaggattatatcggagaggttaatccagacagagttaagttccttcaggttcaggatgttgagaacgagcaggaagaagcagagaagcttatgaacgagcttatggcttatgctgctacatttaagcgtgaaaaggttaatgcaaaggaacttatcattggtatgaagtgtggtggttctgatggattatcaggtatcacagctaatccaacagttggtcttttctcagatatgcttgtatctaagggtggtacaactattcttacagaagttccagagatgtttggtgctgaaacaattcttatgaatagatgtgctaacaaggaacttttcgagaagacagttcatcttattaatgactttaaggaatacttcattaagaatggtcaggagatttacgagaatccttctccaggaaacaaggatggcggtattacaactcttgaagacaagtctttaggatgtacacagaagtcaggaagctcattagtaaagggtgttcttgcatatgcagagccagttaatactaagggacttaatcttctcagcgcacctggtaatgaccttgttgctgctacagcttgtgcagcttcaggtgcacagatggttcttttcacaactggacgtggaacaccatttgcatcaccggttcctacagttaagattgcaactaactcaagacttgcaggaaataagggtaactggattgactttaatgcaggaagaattgttacagatgatcttccacttgaagatgcagctaaggagctcttccagctcgtattagatgttgcttctggtaagaaggttaaggccgagatagcaggattccatgatcttgcaatctttaagcagggtgtaacattataattaatacaataatataaaagatggggactgtatgtgcagtccccattttttatatacaagcctgaaaatagaatgtaccgtctttggtaaaaaatgcatatatgccgttatatttttctattactgaaattatgctgcggacaccaatgccatggtcaggttgatcagtaacaggaatctggttgtggaatcggggttcctcaaagtatgtattggctatgttgatgcatattttgttatttttttcaaacaacttaattgttataagacgcttattgtcttttgagacagcgttatcacactgctttatacaggaatttattgcattttctaaagcatttgcaaggagactgcacaaatcagtaattctgtaacttgaaaaatcagtggcagttactgatatctgtgtggaaatgtctgcgtcatgggctttatttatatatgaagataatattaggttaattgcttcgttgctgcagtatcttgttattcttgtgttatccagattattattaatttcatttatatattcaagagcctgctgcatattgttaccagcaaggcagctttgtatgaaattcatatggtgtcttaagtcatgtctgtatatcgcagcctgtttctgataatctgtaagctgagatatttctttttcagcctgagctgcagctgcggaaagtatgatgttttcacgttctgctgtattttttttgttggacatactgagtgtcactattgacaagaaaaaatacaatataacaataaagctatccatgaattcaattattacggctttgccggtatatagaaggttagtatatacggttagagcatattcgagtatataatatgtaagagggagaaggaaaaacatggaaataatgttttttgattcttctttgagctttattatgtaaggtgaaatgtatttaattaccacaatcagaagaggaatagtgattacaattgttacaacatctgaaattacagggatttcagggaatatatattttgcaagggttccaaaccattttctgggtgtacacatcagataagcggacataaccgcaatgaatgatatgtatatattctggtggcatatatatctgataataagaattaaaggaatatgtatcagtacaggataacatttataaagtacattttctcctaaaagcacgtagaataatgcctgaaacagagcaaatattacagtagtaagtataaaaaggcacttgttgtcttcccattgtattccagcaaaatagaaggatacaatgattccgaatattaaaacaaaaccataattaataaggtttagtactgagactatgtctgtcattaaattctcctccaaatgtatattataggttattcttccatctggaaatccagatattgtttctttatgtccgaaacgcgtctttgtgcaaccgggatagttttgcagttggttaattcaattctgactgtatctattgtcttgatgtaattcatattaacgatgaaagaacgatgtggcagagcaaattctttatgtgtcataagtgtatcacatatagatgagaatacgtctgtcgacattacctgctcgttgtttgaaaggtataatattactttccggttaagagcttcagcatacataatatctgataagtatattttatgtatacctgaattattctttataatatatgtatcattgcgttctttatgaaatgtatcaagaatatcatccagcgaatcatataaagcttctttaattataggtttaagaagataattaaatgctttgactgtgtaactttctacagcgaattcaggagatgatgtcagaaagattacaggtgaaaatctgtcaaaggcacggatttctcttgccagattaatgccgtccattactggcataattatatcaagaaaatatatgtcatatttctcaaattcagcagttgatgccagttcaacactgcttgtgaaacattttataaaaaacttctgacctttgtcacaggcatatatttctaacagctctctgattctgtttaattcagcttcattatcgtcacatatagcaattttcatagtattttcctcattatagcttagtgtataaaatatctcttgattaattatatattgcatgagactaaatttctatatataaatctaatcgttcatgtcaaaaaacttgtaattcacgcagataacctcacaaatgtcttttgataaggtattataactacaatatatagcagacggaaaactaaatattagtatatgtggttataacataaaggaggcgtttggatgaagaggtttttgagtatacttttatgttctgcaattcttgctgcagcaataccgggcatgtattatgcagaagggaatcagtcttcatatgatgagctgtcccagttaaaggagattgattaccagcttaacggtggtcattatgtcagtggctataatgcaccagacaaatatccggcagagcaattaccggataaggatgatattgtcaatcaggggtatgagtttggaggatggtatgataataaagaactgacaggtagtcctgtaacagagatttcagaagagaattacacaggggttgtagttctttatgcaaaatggattgagcgttattattacattgacatacctgaaagcgtagatgctgacaagacgaatcttacagtatcgggacatgcaggcggactgtatgagaaagataaagtaagtgtatctgtttattctaagaatgaatggaatcttctgaatggagatgtaaagcttggatatgaattatataatgaagagaataaactgtctcttactaataattcagtaataacagagcttacagcaacaggcagtgacaagacaagaaaatatatgacaagattacaggaaattcctaaatatgcaggaatatacacagataatcttacttttgatatttcatttgaaacaacaaaatataatattaagtatgaaactaatggcggaacactttatgctgatgataaagatgagcaggggcgtgcaacagaacttgataactcagtgtatgaggcgggaacaaagctttcagatcttccggttccgggcaaggcaggctcaacatttttgggatggtgttatgatgcggactgtacagattatgttgccagtacagacagacttttaagtgatgttgtattatatgcatcatgggttgacggtcaggatcttaagacagtcagtatagatacatacgcaagaagttatgatgttgatgcaaatgattttacaattacggtaactgataagagcggaaggttaactaaagaagaagtaaagaataaagtatcagttaagaatgtaagcgattcttctgagaatacttcaatagatattacagcaggaagtgtattagatgatggggcatatacatttataataaaatgcaatggcacatggcaggaaggctgtggttaccgtcttgaactttcagatgacaggctgtattttacaggttatgaccagacaataagagaatatgattttacagtttataagccggatgtaactaatgtgaatcttagggatgacattaagtatataaagtcaggaagcttaagcaatctttatgttaacggagagaaggctgacagaatatctgtgacggtaatgactgtaggacaggatggtacaataagtcaggaagctgttaaaactacaggaagctttacatattcggacagcacacttaatgtaggagataagattgcagtatatgatggggatgttgtgccacaattagatggcagtgctatatctgatgatgatgtttcgttctttgagattacatcagctaaggggaatgaatattcctacaggggtatggcagcagaggagatactctttgttccagatgttcttcctgttaatgtggctgatgataaggataatgatccggataatgacagtataacaattacaaagaataaaatgtcatatggcagtgacagtcttggaacaggacttggacttgatgaagatacaacagttgatacaggcgattatcttgctttgtatgcaacggggaatgatgagatacagtatgctgttataacaaatgtttcaactaataatgctgattatataatcacatataagaatgtgacatgggatgaagtccaggcagccatggatgtatatcagactgataatgtgagcggtgaaagcatattacagaatcaggatatcagtggcattgaacagagcgttgagcagcaggctgttgatagtggatttgcacagagtgttgtagatgaggttgcacaggctgttgtaagaacgaattcttatcaggagcttcaggaatatctgtctgatactatggacgccgatatcagcattgtgccgcaggatataacttatcttcaggataaggctcagggcaatgttacattatatagcagcaagaaaccggaagtgaagcttgaccacgtaagagctaatctttcaactgatttaaaacattttgagaatgtaagtggattaagacttgctcttgatattggcgttgagatttcattctctaatatgaaggtaattgtatcagcaacatttgagcaggaagttaagattaatattaatgtaagtggtaaggctatatggaaagtatggggcatattcccatatattgatgactaccgtgttgcggtttcattagatctgtatgattacactggaattaattttaatgttaatgtaagaactgctgaagaagatggtgatgacgaaagttcttctaaacttgatgaagtgattaatggaatagcagaagaacttaagaatatgatggaaatcggaactacatatatatctgacaagtcggatttatctacaagacttgaagatattaaggattccgatgatgacagtgagttatctgttgcgaagagtcttgctgaaagatattctgatatgcttgatgatgaggctgactgggttgaattatacagtaagtcattaacagagtcacatgtaagggttattggaattattgatatagagtttaaggttgaattcgttgtctctgctaatgttaatatatcaatgggtatgacttactggtataagaatgccaagagatatgtttacagcattatggtatttgacagaaaggttacaagtgattctattgatttaagcgaagaacagtatgagttctcggtatatgcaataggaacaataggaatacgggcaggaataagactaagtgtggctgtaggtcttatatcaacaaaacttgcaagtgttggatttacagcagaggttggtggatatgcccaggtatggggatatctttactatcagttgaaatatgcagcttcgcagggcagaacagcaagctcaatgggagctatatacatggaaataggcatgtatatggaggttaatttcctggcacaggcactttctggaacgtttagttataatcctacactttttgagaagcaatggccgttgtatagtgttggtgtagttgaaaatgtgtgcgattatgcatatggtcaggattctgttaaagatatcaagatgaagagagatgttaagactgtaagacttcctgatacatattttgaaatgcagtatcttgatatgaaagaaggtcttgacgataataatgagtattttactaaggtttatgatgacagtgacagatatttttctataacaatgactaatccagcgttctcatatgatcctgagactaatatagttgaggttaatccaggcagtgaacctcagcaggatggtgagatgataataacatggaagagtcagaagggttcttttaatactaagccaataacaagaaagatttctttgcactgggataatttaagagatggatattatatagcattccagactaacggaggttcagttgtagatgctataatatctaaatacaataaagtaattacaaagcctgaagatcctgttaaacagggctatacatttgcaggctggtatacagatgaagcacttacaaagaaatatactattccgtcagtaatgcctaatgaggacagaattgtatatgcgaagtgggaagcagctgatatgacttataatgttgttgattatgtggaaggaacggatggtgtgtatacagcagcttcttcaaagcaggagacagctaagactgatacagaggtatcaccaaagcctgacataagaaacggatttatgactccggcagctttatcacagagagtaagtgctgatggaagcacaacaatcaattattattatgcaagaaataaatataatattaagtttgtttcagaaggcagtgttgtttcagaaggaagatatacatatggaactcttatgccgacaccggttgcatatagggcaggatatgtatttgaaggctgggaaccagctgttacacagacagttcctgcaaaggatacaacttatacagcagtatggaaagaagcagatgatgttgtatacacaacaaaatattatcttgaaaatgaatcaggagaatatgaacttgataaaaccagaattaataaagcaacaacaggacagagtgtaactgcagataaggaacagtatgacagcagactttatcatcttacagatgatctgccatctggtactgttgcggcagacggaagtcttatattccgggtgcattatgatagaaattcatacagcgtatcatttaattctatgggtggaactgtgagtactgaaaagaaaacagccagatggggaagcaatgttattgcaccggttcctgtaagagcaggatatgcatttgcaggctggtatgttgacagagcgtgtacagaagcatttgacggtacaatgccggcatatgatattactttatatgcaaagtgggatgcagataaggttaattatactgttgaacatcttgttgaaaagcttgacggttcatatgaattgtatgacagacaggcatttacatctgatactgacagccaggtaacgccagatgttaagtatatggaaggattcagctcaccagagacagaaactgccatagtaaaaggcgatggttcgactgttataagatatttctacaagagaaatgtacacagatttgttctcaagctgaataatggacagccagatgttgaatacgattataaatatggcactaagattaatattattaatccggaaagaaccggttatacatttacaggctggaatgaagatgttgcaggtacaatgccagacagagatgtcacttatactgcaagctggaagataaaccagtacacaatcagttttaatacagatggtggcagtgaaattgcttctataacacagaattataatactgaggttagttttaatgagattccggtaaagaagggatatacattcacaggctgggataaagctgtcccggatgtaatgcctgctggcaatattgttataacagcacagtggaagaaagatgtatatactataagttataatcttgatggaggaaaggcagacaatcctgaaacatatgaggttgatactagcgttataactcttaagagaccacagcgtacaggttatacatttacaggctggagcggaactggtatagatggaacggctatggatccagtaattacaacaggttctacaggtaacagaagctacacagcaaactggaaggaaaacagttatgttatccggtttattccatatggtgatggaacaactggttctatgcaggatatgcagcttatgtatacagataaagcagcattaagtgccaatcagtttaagagaacaggttatacatttgcaggatggacaaaaaaggcaggagcagacaagttatatgatgataatgaaattatcagtggacttggaacagcagataatgaaataattaccttgtatccagcttggactgctaatgagtatacagtacattttgatacaaaggatggagatgcaataaacgaccttgtatttacatatgacaagaaatacgaacttccaaagacttcaagatatggatatacattccttggctggtgtgtagaagatggcggaacggttacatataaaccgggagcttctgctgataatcttgcgggtgaaggaacggttacattatatgcaagctggagtcttaataagacatttacttacagccacccatattcatatcgtgtaactgatgattcaaaggaagaaccagtcaagctgcatttcttcatagatggagcatcaggaacttcaacaagtggttatacaagaactaattccatctatatggaaggtatatctctgaatgagataaagaagcattgcaatacgatgactgttacaatcagttattatattaaaatggtagatgacggatatgcagaggtagacactacatatagaaaagattctgacaagtcatggaatggatggcatggagagaagcttgatctcaagaagaaaaataaacagacaatcacgcacacatacagcataggatgcaaagatatagatgctatatgctacagatttgatgcaagtggttcattttctgataaatatgatttgagcaatattaaggtcagtgtaaggtttgattaattagtaattcgtacagactggttttatgaccggtctgtacggaatgtcaggagggattggaatgaagatttcaaaaaacaaaattatgataacagcaataatagtactgtgcgtagcagttgctgttctggctgcagtgcttgttatcagaaaagataagaataaagataatgatgataaatttacaccaacgattgattctgattctggtgaaattggtacaggaagtaattacagtggcggacagcagggaataaggataccaggatatccatctataactgtagatgcaggaaaagataatgttacaatgaatctgtttaaccctgaaggaaatccatgctactttacatttgaaattgttttatctgatacgggcgagactatatacaagtcagatatggttgaacctggaaaagctataactaatgtaaaactgcagcatccgcttgcaacaggagaacataatgctgttattaagattagcacagcatcgcttacagatggaaagacaatgaatggtgctaatgttgagacagttttagttgcaaaataaataaacagtcattaatggatgaaagaatggaggctattatgagaaaattgacagctatggcattgagtatgatgtttatattgggaagtattattcctgtgggggcagaagagacacagacaagacagacaaaaatatctgtatcaattgatccggtctatacagtgactattccggcaaatacaacaattgaaagaggagaacagtctgttaagcttggaagtgtttctcttgataatgcaagattagagccagacaagaatgtaaatgtatctgtaagtgcaagtggaaaacttaagaacagtaaagatgagagtaaaacaattgcatataagattatggatggtaacaaagaattcagttcagctacatattctgagagtggaaacaatacaaatctgacactttcaatagataagtctgaatgggataaggcatatgcaggttcatattcagatacacttgtgtttacaatctcttacagatagtaaagcagaagatttatatattattaaatgaaaaagagttgtccggtttcccgggcaactctttatttggtctgaatccaaatatgaattaaattaattatctctgaactcttgcgccagcaccaccgacgataccttcaacttccttaagagaagccattgttgtatcaccaggagttgtcatagctaatgcaccgtgagctgcaccgtagttaacagccttctcagcatcttcaaatgtcataagaccatatacaagacctgaagcgaatgaatctccgccaccaactctatccatgatctcaagtccatcatactgagcagccttgtagatttctccatcagcccagcagattgctgaccagtcgttaactgtagctgtcttaacctgacgaagtgttgtagcaacagccttgaagttagggtatgtagcagcagcttcgttgatcatcttcttgtaaccatcaaggttaagagtcttaaggttctcatcgttaccttcgatttcgaaaccaaggcatgctgtgaagtcttcttcgttaccaatcataacgtcaacatacttagcaacttccttattaacttcctgagccttagctaaaccgccgatagcttcccacatagatggtctgtagttaagatcgtaagatacgattgtaccgtacttcttagctgccttacaagctgcaataacagtctcgcaagcctgctcagaaagagcagcgtagataccgcctgtatgtaaccaacgaacacctaaaccaccatcgctcttgttcttgaagatgtaatcgaaatcgaaatcttctggagtagcctgtgaaatagctgtgttagctctatcagagcaacccttggcaccacggataccaaatcctctttctgtgaagttgagaccgtttctgcaaagacgtccgataccatctgtcttcttccagcagataaggtcagttgaaacaccaccctgctcgatgaaatccttcataagaagacctacttcgttatcagcaaaagctgtaataacagcagtgttcataccgaaacacttgtgaagtccacggataacgttgtattctccgccgccttcccatgctctaaagcttcttgctgtacggattcttccttcacctggatcaagacgaagcataacttcacctaatgatacagcgtcaaatgtgcattcttcagctggtcttaaatttaatttcattttttagatacctccaaaatattttattgctacaatagtttaccataataatccgattaattccatcattttacccaaacttttatatgttttataagaaatatgataaattgcaacagcagctgacaataatagaggaaaatattgtatgcaggcatattgaaaaaagtgcgtacaagatgtaatattaataataaaggtttcgatataatataataattattatttacttttaatataagcacagatatacttatgcaaagtgagggttatatatatgaagaatgttaaaaaaatcagacagcttacaatgcgtcttaaaatgcaatggaagattcttataggtgtgcttgttgctggtgtggcatgcggtggagtacttatatttgctaacgctgactcaagtgtttcgctttctctgacaccggcacagtcaagtgtaatacaggggtctacatctacagttattcatgccaatctttcaggtacggatgatgaattttatgacgcgagcaatccttcgaacaacggtattgcaagtcctgtaagacttgaatggacaatatcggatgaagattatgatgttgtaaagtttgttaatccaagttcaggcggagatgcttatctgcagactgtttcagggacaactaatcctacagtatatggtaacagggcaggagcagctacaataacagcagcatatcattctaagaagttttcagatacaggggctgttgtatatgacaatgtacttgctacatcaacagcagcagtatatgttcctattaatgttaatgttgaaaggaaaagggggaatactgttcttgaagaggcagatcttctgaaagaaggagatttaattaccataacagccaatacctgtgagagtaataagctttttattgaaacatctaatgattcaacaggtgaggttagttcagatggaatcgtagagatgtattatagggattcttctaaagtagtacttaaggttattggcggtggttcaactgttattacggcaagaactgcagacggaagcggaattaatcctcttacatatacatttacagtaagggcagaggttaagtttaaggagagtatatctaattcacagggacattttataacacatcttcctagcgatgcatctaacagatatatggtcctttcagataaggattatgaagcatttacatatgaggacattccttctaatgtagttaatcctgttaagtctaacgtaatatataagactgataattcaaatgtggcatcagttgcagttggaacagtatgtggagtacatgccggagttacaaaggtgagtgccggacttactactattgatgttggcggcaatgaatcatggtttacaagagatgctgttaatgttgtagttccatttaagaagatgggaaatgaagtgagcaatatgaatgttggcgatgaacttcagctgtcaacatcagcaattgaatcagaagtaacatggtcaacttctgataacaagatacttcaggtggattctgcaaccggtcttgttaaggcagttggtgcgggtacagctacaatatatgcaacaagagtacaggatgaattatacactgtgtataatatgccatatcagctggcatataagattacagttatagatggttttggacttagtacagtaagcacaacagttaatattggaagttcaatagacattaaggctcttgttactaatcagccaagtaaatcacagattacatatactgtaactaatcaggctaatgaagcaggagttattcctacatatgatcttatagaggtaaaacagtcagatgatggtacagtatttacaataacaggtgttgcatcgggtgtgacacatcttactgtttcacagaatattaatggagttattaagtctgagacttgtgtaatatatgttaccactcctgtaggagatgtaagtattaatccttcttcaatatcaattgacagaggaagcactggaacagtacaggtattattcaatccggcaggacctactaacagcaatgttttatggtcatcatcagatacaacggtagctacggtaacaggagacagttacacagctactattaagggattatctggcggtaatgcgacgattacagtaataactgaagacggacttaaggttgcaacctgtgatgtctatgtaagagagccagtaacaggagttacacttaacgcgacaacagttgagtctactatggcaattgggaaatatcagcttgtagcaactgtaaagccatcaggagacggtgtgaacagaaatgttacatggtcatcctcagatgaatcagttgcaacagttgatgagaatggtcttgtaacatatattaagccaggatactgtacaattgtctgtaaaacagaagatggtgcatttattgcaacatgtaattttattataagcataccagttgagactattaaacttgattataaagatgagattatgtcaataggacagacattaagaatcacagcagaagttctccctataacggctacgaacaggactgtaagttgggaatcatctaatactaatgtatgtatagttgattctaacggtctggttgaagctgtcggaacaggtagcgcaacaatactttgtaagtcacttgatggtggtgttacagcaatgtgtaatatatatgttaagcagcctgttacatcaattgtccttaatacgacagacattacagtgagaaaaggacaggtgttctggcttaatgccacatgtcttccagagaatgcagataataagcttgttacatgggaaagccgtgatgaaaacgtatgtaaagtagaaagcgatggtaaagttacagctacaggtgcaggaacaacatctataatatgtactaatgttgacacgggacttacagcatattgtattgttactgttacacagcctgtaacaggaataacacttaattctgattatcaggaattatgggttggagcaaaatatgctattataccttcaattgagccgatagatgcagagaataagaaagtcacatatctttcaagtgatacatcagttgcaacagttgatgaaaatggtgttgtaacagccttaaagggtggtaactgtgtaattgaagttacaacagatgagtgtcatctcacagcagcttgtacaattgttgttaaggaatatgtttcaacaattacattgagtgaaaataataaattcatgaatgtgggtgcaacaggaaagcttattgcaacggttggcacagatacagcaactaataagaatatagtgtggtcatcatcagataacagtatatgttcagtagaccaggaaggtaatcttagtgctgaatcagttggtaatgctgttattacagctacagcagcagatggaagcggagttacagattcatgtatcataagagttgttaatccggttacgggaatagaagttgtgccggattcattgagattgtttgttggagattcacagaaacttggtgttaacgtatatccggataatgcaacaattaaagatgttgtatggaaatcagctaatgaatcaatcgcagtggttgatgaggatggcgaggtgtttgctatcagttccggtaaagttaagattacagcaacatctcaggatggtaataatatcaaaggaatctgctgggtttatgtaactccaagagttaatatatcctcacttagaattaattcaaaagaaatatatatgcttacaggcagaacaagacagttatcggtaatagtaaggccggctgttaataatgattcatatgaatggtactcatcagatacaggaatagttacggttgatggtaatggtgttattacaactgtaggtcctggtgaagcagaggtttatgtcataagtgatggtgcaggtgttgaatcaagctgtatagttcattcacttgcaataagcaggtctaatattactcttgagcagtatgacagatatacattagatgtaataggaacagatagtaatattacatggagaagcagtaatccaagggtatgtacagtttcttcttcaggagaagttattggacgaaaagcaggaatagcaacaataacagctgttgttaataataagacattaagctgcacagtaagagttacaagtataagataattcaggtaatgataaaattattatgaccatcagtgttgtactgatggtcataattttttggataaaaaaaggagatgcggtcaaacatctcctttttctaaatatgagggggagatagaaagaattctctttgctatctgatatagaatatacatgataaatgtgagcaaaatgtgtacaattagttaaacaaaaataaaaatcataaaatgtattttattgattaatattctctaatatgttaatatcaaaatgttatttaagtgtatggaggtctatatatgccagacgattttaataagaatacaagcatagaagacgaaattgaaaagtcgttgcagaaaatggtagaagaagaaactacagttgccaaagcttatgtaggaaatgctgatgattataaagcagagcagccatcagatattaatgatggaaggacgagagttgttcctaagataacagatgaaattcttaaggaacagcaggtaattaataaatcatctcaaccaacacaagaagaattaactgatagagatattttacttgatgatgatgacgatgaagaaccagaagatgaagataaagagattttgaaagacgccactaagaaaccactggataagaagacaaagcttattatagcaggggttgctgcgggagttgcattagttttaattataataattatagttgctgtatcacttaacaagaagagtaagaataattatgattattattatcagacaggaatgaaactgtacgaagagggtaattatggtgatgcatcatcatatcttagcaaggcttctaaagaaaatgagggaaagaagaatctgaaccttaagtatacattgtatagatgctatgaaagctcaggaaatgaggatgaagctgttaatgtgctgaaggatatactttcatatgatgagaattatgaagatgcggttaaagctcttgcagacatttactataagaaagaggatgcagataatttaacaaagcttataagaaagtatcaggatggaaaatgcagcaatgcagttaagaattatatagtaaaagaaccatcagcttctaaagaaccgggttcgtatgatgatgatgttgaacttaaatttacatgtgattctggttgtgttgtttattatacaactgatggaaaagaacctgatattaagagtacactatatgatggaacagcaattaagttagaaacaggcacaactaagataaaagcagtttctgttaattctattggggtatatagtaaagtagttgaatttgaatatgttgttgaatatggtgctcctgcagcaccagatgtaactcctgcgtcaggaaaatattcagatggagagaagattaagattaataatatccctgacaaatgtaaggcatattatacaacagatggtacaactcctacatcttcatcaacagagtatacaggtgaattcgatatgccaaccggtaatactgtaatcgcatttgtaataattaacgatcatgagcagagcagtacagtagttaagagaaattataatgttgaagtaaagaatacatatacatacagccaggctgaaagccagctgaaaaatgttcttatatcaaagaaggtgcttaagtcagacagcaaagcttcagatggttcaggtgttaattttgtctatatttcaaagacaaaggttggcaacaatgaaatgtatattatcagatatgatgtaataaagggtggttctacaacaactgctggattatatggcgttgatacatcaagcggtaaggtgtatactgttacaggtacagaaggcagttattctgccaaagaatactaaaggttgattgtgcgtaatgcacttcataatattactttttgaaaggagaattgtaatgtataaaattcttaaggctgagaagttagcagagaagatcttccttatggatgttgaagctcctagagttgctaaacattgtgaacctggccagttcgttattgtaaagatggatgatttgggcgaaagaattccacttactatttgtgattatgacagagaagcaggaactataacaatagttgttcagatagttggagcgtctactgagaagatgtcacatcttaaagcaggagatgcatttgaagattttgttggacctcttggatgtccatcagagcttatcagcaaggatattgaacaactcaagaagatgaatattgtattcattgcaggaggtcttggaacagcacctgtatatccacaggttaaatggatgcatgagcatggtgtagatgttgatgttatcgttggtgctaagaataaggaacttataatcttagaggaagagatgaaggccgttgctggtaatctttacataacaactgatgatggaagctatgtaagaaaaggtatgggtacagatgtgcttaaggatcttgttgcagaaggaaaacattatgatttatgtgtagcaatcggacctatgattatgatgaaattcgtctgtcttcttactaaggaacttggaattcatacaattgtcagcatgaatccgattatggttgatggaactggtatgtgtggtgcatgtcgtcttaaggttggcgatgagattaagtttgcatgtgttgacggacctgagtttgacggtcatcttgtagactttgaccaggctatgaagagaagtgctatgtacagaactgaagagggaagagcaatgctcaagcttcaggaaggcgatacacatcacggcggttgtggacagtgtaattagaaaggatgggtttcaaaatggacgtaatgaagaaagtgccagtcagagagcaggctcctgacgtaagaaataagaattttgatgaagtatgtcttggatataacaaggaagaagctatggaagaggcaacaagatgccttaactgtaagaatgcaagatgtgttcagggctgtcctgtatctatcgatatcccagcatttattcatcaggtaaaagaaggaaatattgaggaagcatataagattattggtaagtcaagtgcacttcctgctgtatgtggccgtgtatgtccacaggagacacagtgtgaaggtcagtgtatcagaggaatcaagggtgaatcagtatcaattggtaagcttgaaagatttgttgctgactgggcaagagagaataatgttgagccagagaagccaacagagaagaaaggcaagaaagttgctgttatcggttcaggtccttcaggacttacatgtgccggagaccttgcaaaaatgggatatgacgtaactatattcgaggctttacatgaggctggtggtgtattagtatatggtattcctgaattccgtcttcctaagtcaacagtagttgcccacgaagttgagaatgttaagaagttaggcgttaagattgagactaacgttgttattggtaagtcaatgacaattgaccagttgcttgaagatgaaggctttgatgcagtattcataggttctggtgcaggtcttccaagattcatgggtattccgggcgagaatgctaacgaagtattctcagctaatgagtaccttacaagaagtaatcttatgaaagctttcaaggatgagtatgatactccaatagcaagatttaagaaggttgctatcgttggtggtggtaatgttgctatggatgctgcaagaacagcattaagacttggagcagaaactcatatcgtatacagaagaagtgaggaggagcttccagcaagagctgaggaagtacatcacgctaaggaagaaggaattatatttgaccttcttactaatccgacagagattcttacagatgacaagggtaatgttacaggtatgaagtgtattaagatggaacttggtgaacctgatgcttcaggaagaagaaagcctgtagagattcctggttcagagtttgttatggaattagatgcagttatcatgtcacttggtacttcacctaacccacttatatcttcaacaactaagggacttgacatcaacaagagaaaatgtatagtagcagaagaagaaactggtaaaacatctaaggaaggtgtatatgccggtggagatgctgttacaggtgcagctacagttattcttgccatgggagcaggaaaagctggagctaagggaattgatgaattcctttctaacaactaatcagaatatagtaaacccgctgtgtctgttaattacacagcgggttttattaattataagaattaattaaacattttttcaacgaactgttctgaaaaattctcggcttcttcatctgagagttcagtaaattgtacggttaactgttctttaacataagctgtacggttaaaatatttcatttcttcctgaatatctccagtgtaagaattctcaatatcttctttagttatgttgtcttccagccagttaagtacatcggcggctttcttatcctcagtttcagccttggctttaattttgttagagtatttcaaagaccagacaccgattgcaatgaatccgataaataacagaccaagaacaatattaataaaaaggaatgaaggtgcatctttagttactatcttaatgataccgatatcattaagaatcataagaatgattccgattcctccacatacaaagaatgtgatggcagaagataagttatccttgtacttgtcagtgctgctttcatacaggcttccacctgtaagaagagagtcattcccgttattatcctgaatgttgtcattagttatgtcagttgtgttttcagacataatgttcctccttgttatagaacttaaccataagtcctttgttgttcagacattataaaatataattgtgaaaaaataaagaacatctggattaatgtggtaaaatactaaagaaagatattacagattagtaagattaaggagattgatatgaaaacacttatagtgacagggggaagtcttgatataagctgggcaaaggattttgtcaggacaataaatgctgaatacataattgcagctgacagtggtcttaaatatattgatgaactcggacttgtgccggatatgatactgggggattatgactcagtagaagatggactgcttgataagtataaaagtatagatattaagacttatcctaaagaaaaggattatacagatacgcatattgctattataaatgcattgaaagccggagcgtcagttatatatatacttggggcgacaggtacaaggatggaccacacatttaccaatatatgcaatatgaaggctgcacttgacagtggcgtaccatgttttatatgtgacagtcacaataaaatatatcttataaatgacaagatgggagaagtgaaagtgtccaaaacaggacagtatggtgattatgtatcatttgttccactatctgaagaaacaattataagtcttgcagggtttaaatatgtgcttgatgattatatacttaatcagggtttaagcatatgccagagtaatgaaattaaagaaaatgtggcggttataaatataaaaaaaggacttgtgattgtatttgaaacaaaggactaaaaatacttgtaattattggcagattgtaataaaattaacaaagagttgcgcaatagcaacgtaaaaaacaagggaggtctcgtaatgagtaatacaacacaggcattatcaaggattgaagcaatacttgatgatagcagctttgttgaaatcggtgctggtgtgactgccagatctacagattttaacattcaggaaaagaaggctccatccgatggtgttattacaggatacggagttattaatggtaatcttgtgtatgtatacagccaggatgcaactgttcttaatggttctatcggtgagatgcatgctaagaagatttcagcactttatgattatgctatgaagatgggagctcctgtgataggtcttattgactgcgcaggtttaagacttcaggaagcaacagatgctcttgaaggtttcggtacaatttataagaagatgtctattgcatcaggtgttattccacagattacagcagtttacggtaactgtggcggtggacttgcaattctttcttcattatctgattttacatttatggaagatagcaaggccaagctttttgttaacagccctaatgcattagatggtaataatgaatcaaagcttgactcagcgtcagctaagttccaggcagaagcaggagttgttgattttacaggagatgaggagactattgctaatggtgtaagacagttagtttctatgcttcctgctaacaacgaagaggatgctgcagtttctgcaacaacagatgatcttaacagagcatgcccagatatggtagcagagattgctgatcctgcattagctctttcagatattgctgatgataatgtatttgttgaagttaaggcttcatatgctaaagaaatggttacaggatttattcaggtagatggaattactattggtgctgtagctaacagaacagctctttatgatgaagagggtgaagtggctgaaaagtttgaaccggttcttacagttaagggcgcttacaaggcagagaattttgttaatttctgtaatgcatttgaaattcctgtacttacacttactaatgttaagggattcgaagctacagtggcagctgagaagggaattgcaattgcaagtgccaagcttacatatgcatttgctaacgcagatgtacctaaggttaatgttattacaggtgaggcttatggaagcgcatatgtttctatgaactctaagtctttaggtgctgaccttgtctacgcatggccaacagcttctatcggaatgatggattcacagcttgcagcaaagattatgtatgctgatgagatagcagccgcttctgatgtggcagcaactgtttcagagaaagcagctgaatatgctaagttacagtcaagtgttgagtcagcagcagcaagaggatatgttgatgctgttattgacccggagaatacaagacagtatgtagccgctgcatttgaaatgttattttcaaagagagaggttcgtcctgataagaagcatggaacagtttaattaagaggtgacaatatgaagaagactaatttgaaaagattcttattgttattctgcatgttagcctgcgtattcagtatgacagcctgtggtaatgcacagattgatactaatacagctaaagaatccattaaagataacgaggttgcttatgttgagaattacctcaaggactgggcaaaggatatgattctttaccttgacagcaatcagggtgaagcaggaacagatgctcttattgcagatgcagaagcaggaataacccttaatgatgttaacagtaagatgtatattgttaaccagcagggaatgaatgttaaaacaataggattatacaatagctggaacagcactaaagatgaacttggtgaactcaaagagtctgttgatgttaacaacattaatgtaaaggtcagtgatgaaacaagtgaattatgtactatttcagttaaacttaaattcgaaaagagagtatgtacattcgaattcgtaatcaatacagattacacacttgaaagtggagctattaatccatcatacacaacaggtgagaagatgggtaaggccggaatgaatacacttattggtatgggaactgtatttgtagttcttatattcatttcattcattatttctctgttcaagtatataagcgtatatgagaacagaaagaaagaacagaaagaagacacagcttctgttggtgttgataatgctatagcacagattgtttctaatgaagaagaaaatgttgaggacgatcttgaacttattgcagttattactgcagcaattgcagcatcagaaggaacatctacggatggtcttgttgtccgctcaattagaaaggttaataataggaggaaataatcatgaagaactatacaattacagttaatggtaacgtatatgatgttactgtagaagaaggaacaggcagtgcagcaccagcagctaaggcagccgctcctaaagcagctccaaaggctgcagctaaggcagcagcaccagcaggtgctcagggagcagttaaagttaacgctccaatgccaggaaagattcttaaggttaatgcaacagcaggtgctgctgtaaagaagggcgatgtattggttgtccttgaagctatgaagatggagaatgaaatctgtgctcctcaggatggcacaattgcaactgttgagtgtgcagctggtgattctgtagagtcaggtaaggtattagtttcattaaattaattatgatactgatataaagtgacttacggaggtataagatgagttatattataacaactttaggaaacctcgttcaccagagtgcattcttcggacttacatggggtaattaccttatggttctggttgcgtttgttttcctttatcttgcaattaaaaaaggatatgaacctctgctcttagtacctatttcttttggtatgcttcttgtaaacctttatcctgacattatgttagcaatagaggattcaagtaacggtgtaggtggtttgttacattatttctatttacttgatgaatggagtattttaccatcacttattttcttaggtgttggtgctatgactgattttggtccattgattgctaacccggcaagtttcctgcttggtgcagcagcacagtttggtatctttgcagcatatcttatggctattcttatgggattcccagataaggcagcagcagctatatcaattattggtggtgcagatggtcctacttcaatattccttgcaggtaagcttggtcagactaaatatatgggacctattgcagtagcagcatattcatatatgtcactggttcctattatccagccaccaattatgaagcttttaacaactaagaaggaaagagaagttaagatggaacagttaagacctgtttctaagcttgagaagattcttttccctatagtagttactgtagtagtagtacttattcttcctacaacagcaccacttgttggtatgctcatgttaggtaaccttttcaaggaaagtggagttgttaagcagcttgcagagacagcttctaatgcacttatgtacatagttgttattatccttggaacatcagttggtgctacaacaagtgcagaagcatttcttaaccttgatacattaaagattgttgcattaggacttattgcattcgcatttggtactgcagcaggtgtgttatttggtaagattatgtgtcttgttacacatggtaaggttaatccgcttattggttcagcaggtgtatctgcggttcctatggcagccagagtttcacagaaagttggttctgaggcagatccttctaacttccttctgatgcatgctatgggacctaacgttgccggtgttattggtacagcggttgcagccggtacatttatggccatgtttggcgttatgtaaaaggaggatattatggcagaacaggttaaaaaacctttaaagattactgagacagtattgcgtgatgcacatcagtctcttatagctacaagaatgacaacagagcagatgcttcctatcgtagataagatggataaggttggttatcattcagtagagtgctggggaggagctacatttgatgcttcactcagattccttaaggaagatccatgggaaagacttcgtaagcttagagacggatttaagaatactaagcttcagatgcttttcagaggacagaatatattaggttacaatcattatgcagatgatgtagttgagtactttgttcagaagtcaattgctaacggtattgatattatccgtattttcgactgctttaatgatttaagaaacttagagacagctgttaaggctgccaagaaggaaaaaggacatgctcagattgctctttcttatacattaggtgatgcatatacacttgattactggaaagagacagctaagagaattgaagatatgggtgcagattctatctgtatcaaggatatggccggacttttgcttccatacaaggctacagaacttgtacaggcattaaaggatggttcatctcttcctattcagatgcatacacattatacatctggtgtagcttcaatgacatacttaaaagcagtagaagcaggtgctgatattattgatacagctatgtcaccattctcaatgggaacatcacagccagctacagaggttatggtagagacatttaagggtacacagtatgatacaggacttgaccagaatcttcttgctgagatagctgattacttccagccaatgcgtgaggaagcattaaagagcggacttatgaatacgaaggttcttggagttaatattaagacattactttatcaggttccaggtggaatgctttctaaccttgtatcacagcttaaggaagctggtgcagaggacaagtacagagatgtattagaggaaatcccaagagttcgtaaagactatggagaaccacctcttgttactccttcatcacagattgttggtactcaggctgttcttaatgtattacagggtgagagatacaagatgattactaaggaatctaagaaggttcttgctggtgaatttggtcagacaatcaagccattcaatccagaagttcagaagaaggctatcggtgatacaaagcctatcacatgccgtccagctgacttaattgaaccacagcttgagaaattcaagaatgatccaattgtacagcagtacaagcagcaggatgaggatgtgctttcatatgcattattcccacaggttgctacagagttcttcaagtatagagaagctcagcagacaaaggttgatcctacaaaggcagatacagctaataaggcttatccagtctaataattaatataatagaccgtcatgtgcgcaaaagcgtatgtggcggtctttttttgcaggtaatgagccatgcaatccagaatgtgctagcacaaattctggattatatggcgaatgcagataatgaacaacgaagcacgaagtgcggaagttgtgaattatcaaggctcgggagcagcgaagctgcgtagagacttgacctgcaatccagaatgtttctcttgatataaattcattttgcatgtaaaattaaacagtataattaagcaaaaggagcacgattgtgattaagttagaacgatttgaagtcatgaatatgaataatgccatcagaggtgcaagaaatccattgaacagctgggcaagaatggacagttattttgatgaggaaggaaaatttgtttttggtcctaatgatcttgaccttgccaagagattatgtaaggcaggctcagaccacagaaagtttataagacagatatttgttacggttgatatcacagcaccactttactggtggaaggaatacgatacatataagattggaacagttgccaactcaacaagtacaatgcacaagattcacagcaagccttttgagatggctgatttcagtacagaccatatgactgatgctgcacttgaaatgatgcagaagaatattgatttcctggaagaaatcagaacacagtttgtagaaactaaggacaaagcattatggtacagcatgatacagcttctccctgaaagttataaccagatgagaacatgtactctcaattatgagaatcttgttggaatatattattctagaaagggtcataagcttgcagagtggcacaccttctgtgactgggtaaaagaactgccatatttcgaagagctttttatagataatgaatgatttagaacaacatgctgatatattaagcctcataagagtgaggatgtcagaacttagcaagggacataaaagaatagcagagtatattctggctaattatgaaaaatgtgcatttcttactgcggcaaagctgggagaagttgttggagtaagtgagtctacggcagtaagatttccggctgcattgggattttccgggtatccggagtttcagaaagcgttagaagacattttgcaagaaaaaattcactcgttcgacagaattgatgtgcttaattcacacatgacaaccaatatggtcgtgaataatgttatgtcgatggatgcaagaaagatagagaatacattaaagtcatttgatacagcatcgtttgatatggctgttgaggatataatggctgcagaaagcgtgtatataattggagcgaggtcgtgcgaaccactagcagaattttttgggtattatcttaggttggtcaagaaaaatgtacaggtggtaaagactggcaataccaatgaattatttgaacagatgatgtacataggtgaaggtgatgttgcaataggtatcagctttcccagatattcaatgcgaacgcttaaagcaatggaatttgccaataacaggaaggcgagagttattgccataacagattcagtacactcaccaatgaatatgtattcatcatgtaacctgtttgcaagaagtgatatggcgtcaatagttgattcacttgttgcaccaatgagtcttattaatgctttaatagtatcaatatgccttaagaatagtgaacaggtagtagagaatattgagaggattaacacatttgttgataatttcgagtattcaggcaatgatgagattaatatgttagatgagaatgttgttaacgaattgaaaaaatgcatggataatgcagctattgatgaagaaaagtaagagagagcgataatgagcaatgttataataattggcggaggtgcagcaggaatgatggctgcgataactgctgccagaaacaataataaggttacacttattgaaaagaatgaaaagcttggaaagaagctttttattacaggaaaaggcagatgtaattttaccaatgccggggatgaagaagatatatttaacagcatagttaccaataaaaagtttatgtacagtagtttaagaggattctctaactatgattgtatgggcttttttgatgagctgggacttaaattcaagattgagcgaggcaacagggtatttccggagtcagaccattcgtctgatgttataggtgcactttcaaggcagatgaaaaaactaggtgtaaatgtacttctgaatacacaggttgtagctgtgaatgaggagaatggcaaatttgcaggtgctgttgtaaaagatgcatcaggacagaaggagattaaaggtgatgcgtgtgttattgcaacaggcggtaattcgtattcatccacaggctctacaggggatggctatagatttgcaaaaagtcttggacacagccttacaccaatacttccggcacttgtacctcttaatgtaagagaagagtgggaagaacttcttatgggactaagccttaagaatatagaggttacattttacgatggagataagaaagtatttactgattttggagaaatgctttttacacattttggtgtgagcggtcctgtaatattaagcgcaagcagcgttattactggaatagttaaggaaagacctgtaagattaagcatagacttaaagcctgcaattactgatgaacagcttgatgagagaatattaagggatttctcaaaggaacagaacaaggcgtttaagaattcattagatgagctgcttcctaagaagcttattcctgtgattgtaatgcagtcgggaattaagcctgaaaagaaggttaatgaggttacaagggaagaaagacagagacttgtgaagcttcttaagaattttgacatgacagtaacttctacgagaggttttaatgaagcgataattacacagggtggggttaatgttaaagagattaatccttcgacaatggaatcaaagcttgtcaagaatatatattttgcaggagaggttatagatgttgatgcagtgaccggaggatttaatttacaggtagcatggtcaacagcatacgctgctgcaagtcatatacaataatttatttaaaggagcagagaaaaatgagtgcaatagcaatcgatggacctgcaggagcaggaaaaagtacaatagcaaagcttttagcaaagcagttaggatatgtgtatgttgatacaggtgcaatgtacagggcaatggctgtatatttttcacagaacgacattaatccagatgatgagaatgcaattaatggtgctgtagataatattgatattagtattgagtacaaagatggcgtacagcaggtgatacttaatggtgaaaatgtgacatcacttttaagaacagaagaaacaggaaagatggcatcaaagacatctaagtatgcagcagtaaggactaagctggttgcacttcagagaggacttgcaaagaaaacagatgttatcatggatggaagagatataggaacaacagtactcccggatgcatttgcaaagatatatcttactgcaagttctgatgcgagagctaagagaagatatgatgaacttaaggaaaaaggtgaaaactgtagttttgatgctatcaaggaagatattgaaaaaagagactatgaagatatgcacagagcaatatctcctttaaaacaggcagatgatgctgtgcttgttgatacatcagatatgaatatagaacaggttgtagctgctttaagtaagataatagatgaaaagaaggcgggcagataattgaaagaagtaatacttgcaaagtcagcaggcttctgttttggtgttcagagggcaatggatactgtgtatgctgaggcagacaagaaaaatgtatatacttatggtccaataattcataatactgaggttgtcaatgaacttgagagcaagggtgtaaaggctgttaatgatatatctgagattccagaacctgaaaagtcaactgttataatcagatctcatggagtatcaaaggcagtatatgaatcaataaagaacagcggggcaaagattgtggatgcaacatgtccgtttgtattaaagattcacaagattgtaaaggatgcaagtgctgaaggtgaccagattgtaattattggcaatgagaagcatcctgaagttgaaggcattatggggtggtcagagacacctgtacatgttgttgatacagttgaaaaagctgaaaagttgaaacttgacaagagtaaaaatgtgcgtgtggtatcccagacgacatttaattacaagaaatttcaagatttagttgaaattataaagaaaaaagagtacaatatttgcattagtaatacgatatgtaatgcaactgaggagcgtcagaacgaggcaagacggattgctcgaagagctgatgctatgattgttataggggacagcagtagttcaaacactcgtaaactgtatgaaatttgcaagacggaatgtcaggaaaccttttacattcagactcttagcggccttgagcttgataagctcaaatcatcagactgcataggtattacagccggggcatcaaccccaaacaatatcattgaggaggtttatactaatgtcagaagaaagctttgcacagatgttagataacgaagaatggaaggaaatccgtacaggagaggtggtagacggaagagttattgcagttaagccagatagaattgtacttaatataggtggcaaatctgatggaatcattactcgttcagagtatacatcagctcctgatgtggatcttactactgtagtctcagttggagatgagatgaaggctaaggttcttaaatcaaacgatggtgagggacaggttgctcttacatatagaaagcttgttgcagataatggcaataagaaacttgaagatgcatttaataatcaggagccaattacaggtgtagctaagaacatcaagggtggtcttgaggttatcgttgatgaagcaagagtatttattcctgcaagccttatttcagatacatttgttaaggatttatctgtatataatggtaaggaagttacatttgttatcactgaatatgatcctaagaacagaaagattatcggtgattgcaagcagcttattgttgcagctaagaaggcagcagcagaggcagttctttctaagattaaggaaggcgatacaatcgaaggaacagttaagaatgttacagatttcggtgcattcattgacttaggcggagtagatggtcttcttcacatctcagagatgtcttggggaagaacagagaatcctaagaaggtttacaagattggagattcagttaagtgctttatcaaagagattaacggagataagattgcactttcagttaagtatccagaccttaatccatggaataacgcagcagagaagtatgctgtaggtaatgttgttaagggaacagttgcaagaatgacagatttcggtgcattcgtccagttagaagatggcatcgatgcattacttcatgtttcacagatttcaagagatcgtattgaaaagccatctgacgcactttcaatcggtcaggaaattgaagctaaggttgttgaccttaacgaagctgataagaagatcagcttaagcattaaggcattacttaacgacaacgaagctcaggaagaagctccagcaacagaagagtaataaagatattataagggctgtgaaaagctctatgttgaggcatttgttcacatcagtgggcagatgcctcatttaatatgctggtaatcgggggtattgttatgtattcgaaaaacaagctgtcaattgtgaatggtttatgtgctggtgtattagtctggattattttactgatttcagattatattgatgaaacggtattagataaaggcttttttattggtttgattatatacatgattgtgcctgtaatattagtctgctgttatatttataattacattgcatacaagccggaccggaaaaagcttcttgcatggtttggcggttatagtgcagcatttctggtatctggagtaatggtttttatacttgttaataatggactgcttattaaacaaaaatacaggggtgatggcatttatttaaatggaatggaatatatgttttatggagttcctgccattgttgtttttggaatgttatgtattgtgtttcatttgatatattttaagataaaaaaacatagaaatttggggctgtagaaaaacagccctttttttaaatatattttctgaatgaaagataaatacggcctttttttgtttctctaccgcacccctgatagatgaatttgcctgttccgcggataacaagtatatcattagcttttaactggtagctgttgttttccatctgacggctgtttatgaatatttttcttgccctgaataattctactgcctgacttcggcttagctttgtgaggctggcaacggcagcgtcaattcgttcacttgcagataaaacttcaatatcttcaagctcaggtgaacattcgatatcgttaatatcagtctttgtacactggatatgtgtatgctttactgtagacaggttgtcaactatgaaatcagcaatatgtgaaacacagtaaagataggcgtccttgccttttatatttatgtctccaagcatttctcttttaattccaagattcataagagcaccaaggtaatctctgtgtgacagtgattcagcatatttttctataagaggagatatctttataagagttataggaaattcctcttcatagccaagagtttcgtaagaaccaaactgtatcatctgtctttcacatgcatcattgccaccgtatgttttaaaagctatgaaattaagtgcgtttttcatctgtgcgaatactgactgctcattaatatcaagaaaattagtatatgtgtatatgttttgcctgaaggaacgatttgctgcgtccattattttattttttaaaagcgattcattgtccattagtttataaatagtcctttcaagtttttagaaaatatgatagaattataacagaattaagaataatttacattacatttgtttcgtgggatgatgtagaaaagagggagcatgattaaagattacgaggattttaagaagtttatcctgagtcttacaactattgaccttaatgcatataaggaaaaacagatgaagagacgtatagatacacttattgcaagacataagtatgatggttacgatagttattgtaaggcaataaaggaagatacaggtttaagagaagaatttgttaattatattacgattaatgtatctgaattttatagaaatccgaatctctggaagacactggaggatgttatactgccggatctgataagtaagttcgggccaaggcttaaggtatggagcgcagcatgttctactggggatgaaccatattcacttgctatggtgcttgcaaagaaagtacctatgagggatattaagattattgcgacagatcttgatgaacaggttcttgagaaggctaaagatggtgtatatggtgaaaacagcataaagggacttcctaaggaatttcaggataagtactttgaaaagatgggtgacaggttttataaaatatctgatgacataaaaagatgtgttgagtttaagaagagtaatcttctaaaggatccatatccaacagactgtcatcttattgtgtgcaggaatgttcttatatattttacggaagaagccaagaaagatgtatatgagaagtttaataaatctttagttactgatggatgcctgtttgtaggtaatactgaacagataatcggttataaggatatgggatacagctatgagcatcttttcttctacagaaagactaattaataaaatgcgtaaccggaataatatcagtctggttacgcatttttaattatgaaaatatatgatttataacggaatgcagatattttcttgtgttatcagtgctttctaacagtatatcatctgcgttgcagtatttttctgagtcggaataatcttttttaaatatgtttaaatcacaattgccatagagcggaagaaaaatacccgtttttttggtgtaacagttagaagcagagcatttaacacggttattactgtctacatattgtgcaatgcttttgtggatggcttcgtcttctgatggcagataataataattcttatagtctttaaaaaagtatttcaaagtatctgatataacaggaattacaagagttaatatactgttcttaataagaatatgtatattgtcaatacatatatgtctgtccacgggtactcctacgggcagagaacattcagcaatcagccgaaggctcgaatttccataggaatcagtatctttatcaatgacagcactgtcaacagtgtaagaattcataattactgcgtaataggaaaccagtggaagaaggcttagcattccttctatatcgtcatggttatgaagaaggagaagcttcctgtattcgttatgtgctgtatcagaaggttttgttgcaaattttctgtatatttcaataagttcaccacctgaatacatatcttcgcgttcgattccaagaaaatgttcaatagttttctgtttatagtcagaaagtgacagaatagatttacattttctggcagttttatataagtcaaggctttcaagatgtgaaaggtcaagtgccacattaagatgtgctgcacgctcagtaataaaaggaatatcgaaggcatccccattaaaatgtattaatgtatgaaaatcttttagaaaatcattaaatgcagataaaatataagcctcatcggaatcggattcagcaagccactgcaaataatgtgatattccgttacggaaatatacagcacctatgaggtatactatgttataatttcttgaaaatcctgtggtttctatatcgaagaagcagatgctgtcagtatccggacatattgctttaagcattgcggtgtctgcatttgtgtgcagggtatcattaatagttatcataaataatcctcgtttttaggtttgattaggcaaaccgattgttaaaaaagtactcattttctcttattatataggaatatatacacaaaaaaaagtagatttttgctatttattgagataaaatattatttaataaaaactttataaggagaaatatgtcatgggaaagtgtacatttaaaggtggatgtcatccttatgacggtaaagagttttctaaggataaaccaatcaaagaactctttccagccgtaggagagatggtgttcccgctttcacagcacatcggcgcacctgctaagccagttgttgccaagggcgactatgtccttgcaggccagctgatagccgaggcaggtggatttgtttctgcgaacattcattcatctgtatcaggtactgttaaagctattgagccaagaacattggctacaggcggtaagtgcaattctatcattatcgagaatgatggcgaattcaaagaagttgaatatacacctatgaagttcgaggatcttactaaggacgttatcttagaaagaatcaaggctgctggtgttgtaggtatgggaggagctggtttcccaactaatgttaagctctctccaaagaatcctgaagccatagattacattatcgttaatggagcagagtgtgagccttaccttacatctgattacagaagattattagaagagtcagacaaggttgttatgggtcttaagattgctcttaagatatttgaccatgctaagggaattatcggtattgaagataataagcctgaggcaataagaatcatgcaggaagctacagcttctgagcctgatattgaagttaagccattaaagactaagtatccacagggaggagagcgtagtcttatatatgcaacaacaggaagagctattaattcaagcatgcttccagctgatgcaggctgtatcgtacataatgttgatacaatattctcaatctatctttcagttatagaaggtaagcctcttactaagagaatatgtactgtaacaggtgacggagttaaagagcctggcaacttctatgtatggttaggaactaattacagacagcttcttgatgctgccggtggtcctgtaggagaaccagagaaatatatttccggtggtcctatgatgggatttgccatgtacagtcttgatgtacctgttgttaagggaagttcatcacttcttgtattccagaatgatatcgtatctaagatagagtcttctgcatgtataagatgtggtaaatgtggtgaggcatgtccggaacaccttcttccagcaaaacttgccggttttgcatctcgtaatgatgaagaaggctttactaagttcgatggtatggaatgtgtaatgtgcggaagctgttcatatgtctgtccagccaagagaccattaacacagcagattaaggctatgagaagtacagtacttgctaacagaagaaagaagtagaaaggtgggcaatcaaagtgagtgagatttttaatgtatcgactaatcctcatgtgcgaagcgggaatactactcagacaataatgagagatgttcttattgctttaactcctgccagcatatttggtatagttaattttggcctcgatgcactgcttcgtatagtaatcggtattgttacttgtgtagcatgtgaggcattatatcagtatttcatgcataagaaagttactgttacagatttaagtgcagcagtaacaggtcttcttattgcattaaatattccatcaacattaaatgttggttttgaaatcgtaggatgtgtatttgcggttatcgtagttaagcagctttttggaggtctaggacagaacttcatgaaccctgctcttgcagcaagatgttttcttcttattgcatatacaggcccgatgactaattttgttacatctaacggatttttagatgcatattcaggagcaacacctcttgcactccttaagccgggagcagaatcaacaggcgttgtttcattagcaaagatgtttattggtacaacaggtggtgttatcggtgagacttcagcaatctgccttcttttaggtggtatctatctccttgcaagaaaggttattaactggagaatacctgtaacatatgtaggtgtatttgcagtgcttatattcctttttgcgccaggacatcattttgatgtaatctacatgcttgaggaagtatgtggtggtggacttttacttggtgctatcttcatggcgacagattatgtaacttcacctattacacctaatggtaaaattgtattcggatgctgcttaggtcttcttacattcatcttcagaatgtatggtggttcagcagaaggcgtttcatatgcaattatcttctgtaacctcttagttcctcttattgagagagtaacagttcctaagtcatttggtaagaagaagccagagaagaaagcaaaggaggctgcataagatgaagaaaatagttaaagatgcattagttttatttgctataacacttgtagccggaattcttcttggtgttgtatatcagataacacttgatcctattgcaaaggctaatgagaatgctaaggaaaaggcttacaaagcagttcttgcagaagcagacagctttgagacaatagatgcccttccttctgatgatgatattaatgcttcatcagacattgacttctctaaggataaggtcaatgaagttgctataggaaagaaaggcagcgagacagcaggttatgttgtaacagttacagatagtgacggttacggcggagatatcaagtttacagttggtatttcaacagatggaaaggtacttggagtatcatttctttcaatcagcgaaactgctggtcttggtatgagagctaaacaggatccatcatttacatcacagtttacagctaagtctgatgcagttgcatcattttcagtagtaacagatggttcagcatcagaaagcaatgctaatgttgatgcaatcggtggttctacaattacttctaaatcagtcacaaagggtgtaaattatgcgcttgcagtttacaagcttgtggcaggaaactagggaggtgcggactttgaataaatgtatagaaagactttataatggtattattaaagagaatcctaccctggtacttacacttggtatgtgtcctacacttgcggttactacatcagcaatcaatggtataggtatgggactttcttctacagtagtacttgcattatcaaaccttatgatttcattacttcgtaaggctattccagatggtgtaagaatgccagcgttcatcgttgtcgttgcatcatttgttacaatggtacagttccttatgcagggcttcctgccaagtctgtacgactcacttggaatatatattcctcttatagttgttaactgtattatccttggacgtgcggaagcctatgcttctaagaatcctccaattccttcattctttgatggaataggtatgggacttggattcacaattgctatcacaatccttggagcaataagagagcttatcggtggcggtacaattttctcagatggtactaacgcattattcgatctctcaacaatcggttacacaccagcaagtatctttatccttgcaccaggagcgttctttgttcttgcattcatgattgctattatgaacagaattaagagaaagaaaggcatgaagcctgcagaagttcctgactacacagaagagatagaagaagctaaggctgaggctaagaataactaagggaggtaaatatgggatatttttcacagttattattgatagctgtaagtacagcaattgtcaataatgtagttttaagccagttcctcggtttgtgtcctttccttggagtttctaagaagataaacacagcagcaggaatgggtggcgctgttatcggcgttatcactatttcatcagctgtctgcagtcttatatatgactgtatacttacaccgcttaagcttacatatctgaatacaattgtattcatccttgtaattgcggcacttgttcagtttgttgaaatgtttttaaagaagacatcaccatctctttatgaagcacttggtgtataccttccacttattacaactaactgtgcagtacttggtattgcacttactaacgtacagaactataacacagcggcaggacttaatattggtcagaagcttttagattctgtagtcagtggattaggaacagctgttggttttacaatagcaatcataatcatggctggtatacgtgaaagaaacgaattcaatgatgttccggaaagctttaagggaatgcctattgtattacttactgcaggacttatggctatcgcattctttggattttcaggtattatttaagaggaggacgacaagatgtcaggtataattattgctgcagttgttgtaagctgcactggtcttcttctcggacttttcctcggagtaatgggtaagaagttctatgttgaagtagatcagaaagagatagatgtaagagcagagcttcctggaaacaactgtggtggttgtggatatgcaggatgtgatgcacttgctaaggcaattgccgcaggagaagctccagcaaacgcatgtccagttggtggcgcaccggttgcagcaaagattggtgcaatcatgggtgaggaagttggagaatcagtaagaatgacagcatttgttaaatgtgctggtgactgcgacaaagcaaaagaaaattatgtgtactcaggtgcaatggattgtacagcaatgaacgtcgttcctaacggcggttctaaggcatgtacatacggatgtatgggatatggttcatgtgttaaggcatgtccttttgatgcaattcatattgttaatggtattgctgtagtagataagggcaaatgtaaagcatgtggtaaatgtgttgctgtatgtccaagacaccttattgaaatcataccatacaagagtaactatacagttaactgttcatctaacgataagggtaaagatgttatgtcagcatgctctgttggatgtattggatgtatgttatgtacaaagcagtgtgagtttggtgctattacagtagaaaacaatattgcacatattgattattcaaagtgtacaggttgtggaaagtgtgctgagaagtgccctaagaagataatacatcttcattgataatttaatcacaataagttataataagaaactgccgtaggcttatgcttatggcagtttcctagtttaagaaaagagaagatacacctatggcagagatgaaatcgaagttacaagatttttataaaagacttgattccagaaaatcaacatattttctggcttattcagttatttttgcaatccttgctataggtgtgttttctttttattttttcactggaaagacattcatatgggaggttgatggctgggaacagcattataagtcactcatatattattcacagtatttaagggatttctttaaaaatatatttatcaatcatcagtttgtaataccacagtgggattttgcaataggtgagggaagtgatgttataggaacatttcactattatgtgataggcgatccatttacatttttatgttttctgtttccagcaaagtacatgtatatattctatgaagcaatgattcttttaagaatatatctgtcaggtatagcattttcaatgctgtgtttttatacaggacataagaaaagatatgtccttccaggagcagtagcttatgcattctgctactgggcaatatacaatgcggtaagacatccgttctttcttaacccgcttctgtattatccgctgcttatattgggtgttgagaagataatcagagagaagaaaatgtggctctttacaataacagtagctgttgctgcaatgagtaatttttatttcttctacatgcttgtgttcacaacaattatatatgtaattgtaagattcatattctgttatggaaagaatgtaaaaatgtggggcaaaggaatattaagacttgcagtttcatcggttacaggactgtgtatggcggcaatagtgtttctgcctgtgcttcacgttttcttaagtgacagcagatttaatacacctaataaaatgggactggtatatcctttttcatactatgcaaagcttccgggactttttatcgttgagggtgataatttctggacatgcatgggatttgcagtgccggtgttacttgcagtgcttttaatgtttaagagcagacgtaagtacacaatgcttaagacttattttattataagtgctgtgatgatatgtataccgttcttcggacaggcaatgaacggattttcatatatgtgtaacaggtggatatattcatttgcattattatgtgcatatatacttgtgtgcatgatgccgcgtcttataacactggaaagaaaagaaatccgctttattggaattgcacttacaatatattttgtagtatgtatgtgcgtaaagtattcaagaaatggcaagcttataagtgcagttgcaattggagtaatattgctaattggacttagcataaagaatgttaatgaatataacagatgcatgatggtgacagtagcggttatgctggcggcattagctaatggtatatggaaaaatgcttcatttggggaaaattatgcggcacagtgcataagcgttaaaatggcacaggaagatgtgtttggaagcgagaaggagcttataagtaaagatgctgaagatacagattttatcagatattcaggctctggactttcgtacaatatgaactgcataacaggaatatcatcctctaatctgtactggacacttactaatccgtatgtatcgaagttcagatatgattgtgcaatcaggcttgatacgctgcttccgcacaaatacacaggctatgatgacaggtcatctcttataacattgtcatctgcctcaaagtatctggtaagtaagaccggcggacttgttccatatggatttgcttatgaatcagaaaatgatgattatgtaatgtataataacgacaatgcacttccgttaggatttacttatgacaaggctgttaataagaatgaatgggagggcttaagtgcagttgataagcagaaagcaatgcttcaggctgttgttattgacaggagtgggaaggataccagggaggcgcttcctgacagggtatctgttaaagatttaagttatgacagccagattaaagattatacaatgaattatgatgccaaagaagtacagtgtatggataatacatttgcagtaactaaggcaggtgccagggtgacatttaactttacaggcagtggtgcaggcgagacttactttaatattaatggtcttgactatgaaggagcggcacagttccagctgtattttggaaagaggaagtttgacccattagacttatactctaaggcagactggaaagagctttcacataatgaaaagaagaagatatttaagaatttcatatattggacacagtctacaagcagtgttaagcttgggattacgactgatacaggagtaaccaagtcaatgaattactttacatctgattacagctattatagtaaccagcatgatttcagtgtgaatatgggctattcggaagaaaatgtgacatcagttacagtgactttccagaagattggtgtgtattcttatgatgatatacagattgtatgccagccaatggacagttacactgacgagattaatacacttaaagaaaatgtattaacagatgtagagcttggaaataataaggttacaggtcagataacacttgaccgtaataaatatctgtgtcttacaatcccttattcaaagggctggaaggtatatgtagacggggaaagacaaaagctatataatgctaatggtcagtatatggctgtatatcttacgagtggaacgcataatgtaacacttaagtattctacgccgcttcttaaagagggagcgttggtgtcacttgcaggtgtggccatctttgccatgcagcttgtaattaataagagaaagaagagggaataataatgtacagagaagttgcgaaacttattatatatggtaatcatgaggacactattcttatgaaaatgtccgatattttcaaaaaatttgacagggacgaggagactcctgacaagcttataagcgatatatatgagcagattaagagaatattggaggttgccacagattatggctttgataagaatttatggcataattatcttacattctatcttataactaatgagaatccattcagccttacatgtgaaaaggtaggtgctaatgatggaagtgttaatgaatttgctaaaaacgacttcaaggtgtttatgaatctgtttaattatgatttcagacctattgaggctgcacttggaattaactgtttttcacttatatctgattacaaggcaattgttaagaaagagcttatgtacaataagaatgtaagtgagaaggtacaggctttaagccttaagcttgagacagcaaaggacgagaatgagttctttaattatgttactgatttctataaagcatatggtgtaggaatgttcgggcttaataaggcattcagggtaataggcggcgataatggcgttacatttacaccaattaacaatatggataaggttatgttagatgatcttataggttatgaaatccagaagaagaagcttgtggagaatacagaggcctttgttcagggaagaaaagctaataatgcgcttcttttcggtgacagcggaacaggtaagtcaacttctatcaaggctattgtcaatgaatattatgaccagggtcttagaatgatagagatatacaaacatcagttcaaggatttatctaatgttatagcaagcattaagaacagaaattacaagttcataatatatatggatgatttatctttcgaggaattcgagattgaatacaagttcttgaaggctgtaattgaaggcggtgttgagactaagcctgataatattcttatctatgcaacatctaacagaagacatcttatcaaggaaacatggaatgacagaaatgatatggaaagcaataacggtcttcacagatctgatactattgaggagaagctttcattagtgaacagatttggatgccagataagctactctaagccatcacagaaagaattctttgatattgttattggccttgcaaggaagaataatgttaagatgacagatgaagagcttatggcagaggctaacaagtgggaactttcacatggtggaatatcaggaagaacagcacagcagtttatcaattactgtcttgggggtagagaatgatttcatacattaaaggtgaacttgccgaaatcctgccagatgtaatcgttgtggaagccaatggaatcggatataatatatatgttccgggttcagttcttggtgagcttccatcagttggcagtgaggttaagatatatacatatatgaatgtcaaggaagatgaatgcagtctgttcggattccttacaagagatgatttaagcatgtttaaaatgcttatctgtgtcaatggtattggccctaaggcagcgcttggtgcattatctaatatcacagcagatgatttaagatttgcagttcttgctgatgatgtggcagcaatcaaggcacttcctggtatcggacctaagacagcacagaagattataattgagcttaaggataagttaaagcttgatgaagtatttgaatcagcactttctaagaataaaaaggcagacaataacagtaatgtaagtaatgtcatgatgataagaaatgacgctgttgaggcacttgtatcacttggatattcaagcaaagatgcacttgttgctgtcaaggaagtggaagatatagagaataaggattctgagacggttcttaaggaagcgttaaagaagctggctaaattctagagcagaatagtatttgagaaatgaggggctatatggaaaagaggattatatcaacacagataactgaagaagattatggtattgagaattccttaagaccattatctcttgatgactatgttggacagaataaggttaagagtaatcttaaagtatatattgaggcagcaaaggaaagaggagaggcacttgaccatgtgcttttctatggacctccgggacttggaaagacaactctggcaggaattattgctaatgaaatgggggttaatatcaaggttacatccggtcctgcaatcgagaagccgggagatatggcagctatacttaacaacttgagtgagggtgatattctctttgttgatgagattcacagacttaacagacaggttgaagaagttctgtatccggcaatggaggattataagattgatattatgatcggaaagggtgcaacagcaaggtctataagacttgatctgccacagttcactctgataggggcaacaacaagagcgggacttttatcagcacctttaagagacagattcggtgttgtaagccatatggaattctataccgttccggagcttgagaaaatcattatccgttcagccaatgtgcttaatgttgatattgactcagacggagcacatgagcttgcaaggcgttcaagaggaacaccgagacttgccaacagacttttaaagagagtaagagattttgcacaggttaaatataacggacatatcaataaggatgttgctgattatgcacttaatctgttagatgttgacagagatggattggaccgtaacgatcgtgttatacttactacaatagttgataagtttgatggcgggcctgtcggtattgagacactggcagcttcaataggcgaggattcaggaactcttgaagatgtttatgagccatatcttatacagaacgggtatattaacagaactccaagaggaagagttgcaactaaagcagcttatgataatcttggcaggccattcaaacaaaaataacataaaatattctaaagaatgtgttttatgagttgaatagtaagtgtatttattatatacttaatatgtttatttctacatatatggaggggacttatgtcatcaaagaatacagcagaagtaattcttggaggtaaggtaatcaagcttggtggatatgaaagtgaggagtatcttcagagagttgcatcatacattaataacaagataactgaatttaataaagaagagagttacagacgaatgtcagcagagctcagaactgatatgatgtatcttaatattgcagatgattacttcaaggctaagaagatggcagacagtctttcattagatattgagaacaaggataaggaaatatacgaccttaagcatgagcttattgcagcacagattaaggcagaaagttcagcaaaagagattaaggaattaaagagtgagattaacaagtatcagaagaatattgtcaggttagagacagaactgaatgactctaagaagtgatttacataagattatctggtattaataataacggctgttgcaaatgcatttgcagcagccatttaatttaaaggcggttacaactatgaatgttgataagagaaaaacacaggtggaggttttagcaccagcaggttcacttgatattatgaaagctgttgttgcggcaggggcagatgccatatacctgggaggcaatatgtttggagcaagggcatttgccaataattttaatgatgaagagcttatctgtgctattgaatatgcacatttattcggtagaaaggtttacctgacagttaatactcttcttaagtcaagagagatagagaacagccttatagaatatcttataccattctatgaggcaggtcttgatgcagtgattgtacaggatatgggtgtgtttaaccttataagaaaacattttcctgatatggatatacatgcaagcacacagatgacacagaccggagtgtatggcagcaggcttttaaaggaacttggtgcaacaagaatagtcacttcaagagagatgaatctgcaggaaataaagcagcttcatgagagattagatgtggagatagaaagctttgtgcatggagcattatgttactgttattcgggacaatgcctgctttcaagctttaacggaggaagaagcggcaacaggggaaggtgtgcccagccgtgcaggatgccttatgatgtgtatgataacggcgaaaagattaataacagaaacaacagttacgcattaagccctaaggatatgtgtgcattacagatacttcctgatgttatagaaagtggagtgtattctctgaaaattgaaggccgtatgaagaatgtcacatatgcggctatggtaacgcatatttaccgtaaatatgttgatatgtatcttgagaggggacgaaaaggcttcaaggtagataagaaggatattgatgacatttcagatatatataacagaggtgcatttactacaggctattatgacagcgtcaagggaaagaagatgatgtcactggggcgtcctaaccatatgggaacggagtgtcttaaggtagtatctaacaaggcaggaagaattacatttaaggcattaaagaatgtgaacagaggcgatgtctttgagattgataaagagcattcatttgagagcggagctgatgtggcagcaggacagaccttgattgttaatcttcctaagaaatacccgctgtatgagggaagaattgtcaacagaatgaataatgctaagattaaggcatatgtagcggacaattatgtcggaataacacctaagcttcatgtagatatgaggcttgttgtaagaaagaatgaaaatatatcacttacagtaatgtatgatggaattgaaaagtcatgtacaggagagatagttaccgaagcacagagccgtccggcctcagaggaggaactggttaagaatttaaagaaaaccggcgatacatgttttgtggtggaagatgcagaagtgcagcttgatgatggtgtgtttgtgcctgtcggctggattaaagaattaagaagaaatgtacttgaacagcttgagacacatttaaagcacagtcttgtaagaacttataataagcctgaatgtgcagagcctgacgacaagaaagaagctgatgataataattatcaggtaagaaaagctgcataccttcatgatatagtgcaggtaaagaaagcagcatcagtttcaggggttgaaagcatttatcttgattataagatgttttatatgaatgatgagaattcattaaaagaggctgtaaagcactgtcagtcacatggaatatatgtatatatgttccttccacatattcttaaggcagagaaatatgataagtttaagtgcttgtgtgagaaggcttctgactgtggcatagacaggtttgtatgctgtaatattgagcagattggttttcttggaagtgacaactggaagaaattatctgacaaggtgcatattattacagacagcagcatatatatatttaatacatttgcaaaagatgaattaagaaggctgtgcagtaatgccggggttattcttgacagaatgacactgccacttgaacttacagataaggagatgaagcctgtaattggaagtgacactgaacttgttgtatatgggaatgtgcctcttatggtatctgaacagtgtgtgagaagaacttacggaagatgtgacggaagctggggcagcattaatattacagggccgaagggcagctcttatacagtggaaagtatgtgtgaattctgttattctgtaatgaatggagaaaaactcaatcttacaaaagaaaatcccgaagaatgcggggtgtgtgtaattcgttatgaatttgacgaaagtgaagcagatgatatacaattagttatgactgatggagtgagtggtggtactacaggacattttcatcaggcaatcgactaagattaagtgacttgaataaaggagattgctatgcagtcagtttttattgaacttacaaaatacatatttgcttttctgatggcgttttatgttctttctgcttacagaggagcaataatccataaggaagaaaagagaaaaggaatatatatccagcagtatattataatatttgcgatacatttccttggatattatgtgttgtatcttatgaagggtgagactagatatataggcttttattttgtgcagcttatatatcttatagtattcattgcgttttattacatattgtatccaaaggcttcaaggcttcttgttaataatatgtgtatgctgatgtcagttggatttatcatgatagcaaggcttaattttgacaaatgtgttaaacagtttgttattgctgtgcttggaacggttattatgtttcttgttccatggcttatcaaatcagttaagagtttcagaaactttggatggatatattgcatttcgggacttgtgcttttgtgtgctgttttattaggaaataaggtgtatggagccaatcttacattaagcataggagcattttctgtacagccggcagagtttgttaagattttgtatgttatgtttgttgcttcaatgtttaataaatcaacaacatttaaacagacatgtattgttacagtatttgcagcacttcatgttattatacttgtgctttcaacggaccttggtgcggcacttatattttttgtagtatatatcgcaatgctttatatagcaacaaggaagctttcatatgccggggcagggctgcttgccggagcgggtgcatctgttattgcatataagctttttgcacatgtgagggcgagagttattgtatggcgtaatccgtgggaatatattgatactagcggatatcagatatgtcagtctctttttgcaattggtatgggatcgtggtttggatatggattatgtcagggtatgcctgataagatacctgtagcagagaaagattttatgttttctgctatatctgaagaatttggactcatattttcaatagctctattcttagtgtgccttaataatcttattcttatgatgaatatagcttcaagatgtaagacacttttttatcgtcttgtagctgtaggacttggggttacatatggggttcaggtgttcttaactgtgggaggtgcaattaagtttataccgatgacaggtgttacacttccttttgtaagttacggtggaagctctatattaagctcgcttataatgtttgctcttattaatggaatgtacaatatgagacaggatgaaggtgacaggaaagatggcagaaaacaaaaaacaggacagacgaagaaaaaaacaaaacatacaaagtgatatagttgataatgaaaagaagaatctgcgaaataaagagactaatataattgcattcttttttgtaggactttttcttgcaactattgtgtatctgtgtatatttaatgtaaaagatgcaggaacaattgtgaataatccttacaataaaagagtagacaatcaggaaagcaaggttgtaagaggtgatatattagcaaatgacggagatgtacttgcaacaacgcttacggatgaggatggtaatgaaacacgttattatccttatgataatctgttctgtcattcggttggatttacttctcttacagggatgaagacaggaatagaacagtctcagaattatttccttttaagtgagacagataatatgcttgatcagattggtaatgacctgtctggaggaaaagcaaaggggcataatgttacaacaacacttaatgttgaacttactaaagcggcatataaagcacttggtaataataaaggtgcagttatagcgatggaacctgctacgggtaagattcttgcaatggtatcgaatccatcatttgatgcaaatgcagtaaataccgattatgatgagtggattacttacgatagtgcggattcggtgcttttaaacagggcaacgcaagggctatatccacctggttcaacattcaagataattactgctcttgcatatataaggcagaatcagaatgattattataattattcatataattgtgatggacaggcatatatatctggtggaactactattgcatgctttgatcatacggcacatggatatcaggatttaagaaaagcatttgctaattcctgtaattctgcattttctacgattggagcaggacttaataagacatctttcatgaatctgtgcagtacattattatttaattctaatcttcctgtagggtttgagtattctaagagtacaatggctgtaacacaggattcttcgataagtgagatgcaggagaccggtatcggtcagggaaggacgatgatgacaccgcttcacaatatgatgatagcggctagtgttgctaatgatggcgttatgatgactccttatattgttgacagtataagtgacagtgagggaagaacggttgttaagaataagccagcagaggcaggaactgtgatgtcagcagaagaggcagaataccttacagaatgcatgagagaggtaataacttctggtacaggaaattctatgaaatattcatcatatgaagcagcaggaaagaccggttcggcacagtatgatgactcggacagatatcatagctggtttacgggctttgcaccttatgataatccccagatagcagtatgtgtgattctggaagggggttattctggtgtgtcaagtgcacaggtggtagcaaaagctgtgtttgatacatatttcggctattgatattgaagttgtgagaatgtataatattgtttagtgattaattgcatgattatgaggaatgatgatgaatactgttaactatatcactccgtcagatggtgacatatatcttgttaataaccagacatatgttaattctggtgggactgattttgataaaatatataataatattactgtggatgattctcttgagaatatttttgccggagcagcaaaagaatttggaatcaatgagaattttcttaaagctgtagcacaggcagaatcagggtttgatccggatgctgtatcgtattgcggagcacagggaataatgcagcttatgccatatacggcagaaagctatggtgttacggatccttttgatgccagacagaatgtatatgccggtgcacagatgttatcagagctgttagacagttatgatggtaatgctacgcttgctcttgcagcatataatgctggcagtggttcagtacagaagtatggaggagtgcctccgtatgaagaaacgcttaattatatcagcaagattaatgatatattaggtggtgtacttgctaacgattcaacaaccgttgatggtgcatatgctacagattttacttcagcttctgatgtgaatgctcctgatacaattacagggaattatgtcagtaaacatacagcgactgaaaggacaggaagcggttataaggaacaggataacagttcgcttataagttatgaggagtatctgtatgtatgtgaaacatataaggatatccttgctaaattattttcggcaatatctgcagataaaggtgacaatttagctgcagaattgtataatatagtcacaggaaccggttcagaaagaattggtgtaacaggaacggatattattaataatagcagtgatgaacagcagtacataaagactgggacatattatggacagatagaggcaaatgttcagcttattaacagaatgccttatgataatgtatataagaatgatccacagtcagtatatcaggcacaggcatctatgataagtccacttgttattaagcttttggaacagtaatccggactaacaggaaagaggggaatgatatgagtggtagccgaattaaagttacattgtacaacagaacatttaaagagattgatatgtcagattttacaagaataacagaagggattttttctaacagagatgatattgtagaggttgcatttccagaaggggtagaggtaatagcacctaatgcttttgaaaactgcaggagacttgagaaagttgagtttccaaagtcccttaaatcaattgaaaatgaagcgttcattaattgccttagtcttaaagaagcggactatggaaagaatgtaacagttgcacctgatgcatttaagggatgtattaatttataatttcattaattgataagaagcctttagtggcttcttattttttgcagacatatcatactaaaaacttgacaaatatttctgcataatataggatttcttacagtggcctgactatgcgttggtgctgtatacgtgggcttgcgaaagatttttagaaattcagcacagaaacgaggaagataatgagtaagaaaaagacatttgttacacttgaacagcttaaggaaatcgacaaaacatatccgactccttatcatctctatgatgagaagggaatcagagagaacgctaagagattaaaggaagcattctcatggaataaaggttatagagagtattttgctgtgaaggctactcctaatccatatattttaaagatattaaaggattatggctgcggtgttgactgtgcatctatggcagagcttatgatgggctatgcgcttgattataagccggaagagattatgttctcatctaatgatactccagcagaagagtatgcatatgctaatgagataggtgctactatcaatcttgatgatattactcatattgagtttcttgataagatattagacggtaagtttcctgaaacaatgagctgccgttacaatccgggcggatatttccagcttggaacatctattatggataatccaggtgatgccaaatatggtatgacacatgaccagattattgaagcatttaagatattaaagagcaagggggttaagcatttcggtatccattcattccttgcaagtaatacagtatctaatgaatattatccaacacttgctaagattttattcgagcttgcagttgagttaagagacaaaacaggtgcagatattaaatttgtaaatctttcaggcggtgttggtgttgcttacaagccagatcaggagcctaacgatattgcagttatcggtgaaggagtacacaaggtatatgatgaggttcttggtgcggccggaatgggtgatgttgcaatctatacagagcttggaagatttatgcttgctccatatggctgtcttgtaactaaggcaattcatgagaagcatatctataaggaatacatcggagttgatgcatgtgcatctaaccttatgcgtccggcaatctatggtgcatatcatcatattactgttgcgggtaaagaggatgcaccttgcgaccacaagtatgatgtcacaggttctttatgtgagaacagtgataagttcgcaattgacagaatgcttcctaagattgatatgggcgattatcttattatccatgatacaggagcacatggtttttctatgggataccagtataatggaaagttaagatcagcagagcttcttcttaaggaagatggcagtgttcagatgatcagacgagcagagacaataaaggattactatgctacatttgatttctgtgatgcgttggataagttgaatttaaaataaacgaggtttgatatattgaagaatttaggttatatagcaggcgaaattacaaagggaaagaatctttcagaaaatcttttaaagtatggtaatggaatgtgttccatgtataatgggcttggatttatcaaaatgtccatgaattattatactgtacttgatattgcaagagatttacagaatgataaagaccttcttaacatgattaacagacttaatgagcttgtggagcgtttcgtggagaatgatgaatgtgatgattatgaggcattcaacgaactcaattcattccgtgaacagattattgagattatggaagttataacagcttatgttgacagattaagaatatatgaacatgtacttaacagagttgagcacagatttaacgagggtgaattggattacgactactataatacctatatgactaatgagattatgcattatatattgtctgataaggataatgttgttattaatggcaagatttcagagatagtaggacagcttcctgtaagaatgttaaaggacagattctttgagcatatcagagatgcatttacactgtatcatggtgctggaaaggattcgatagatgatttctattacactttaagtacaagcgcgatgctctcaggtgaggcgggatttgataagttcccggatgtctatgatatatataatacacttgcaggggctgattacagaaatattgataaagacgaatatgtaagactcaaaggagcacttgatattgcaactgagaagatgacagattatgctgatgtatatgtgcttcttacacaggttgttaatgatgcactcacagttgtccttacaagaagaaatacgcttgacagaatagaagagatagagaatgccaagaatgttttaagtaagacgagaaatgcttatgttacaggtgaaagatttgaagatatttcagaagattttgctgcatttgaaggaaaacaggaaagaattcttgaggcagtatcatctggtgattatgcaatagaatacagccttgctaactttgtggatgagcttaaggaatatgagcttttatctgcatataatgctttgtctaaaacacttaagttacagtcaggcagtgattttgttaaacttgaatcagaggtatttgctgagattcctgataattcttatgctgatgagacggcagaaaagcttattaaggaacttgacgacagttttaaaaacatgaatgtaatggttaagagagctgttatggcatcagtgctttcaagtcttccggtattctttaacaatacggaagagatacaggcttatattaataattctcttatgcagtgcaatgatgatgcagagcagaaggcagttgttgagattattaagacaatgataagtgataactaatgcaaatgtgctgatgtgcatatgagaagtttaagttttttgggggatgttaagttgaagtggtatagatatctttatcttggggataacgcaagaaaagcaaaatacaaaacatttggtcttatcagaaagagcagatttaccatagatacttatattgttgcaatttctgtcaatcctgataatattcttgatgtttattcagctaatatgctgaaacagccacattttaagaataaatcatacagagataaagtgtatgttgtaggacttgcgaagggcagggatgaggcacttgaactggtaagatgcatagttgacgacacatattcccatacaggaggcgttgatgtcgctggttatcttaggtttggcacagaattaaggaagggcagctgacatgctgctggaaaggtggggctatgctgcatgttttattgcttatacttaagataacgggcatagttatcgcgtgtattttaggacttgtaataattgttgtggcagcagttctttttgtgcctgtaagatataaggctgatgctgattatcatggtaagttcaaggtacatgcgaaattgtcatggcttggaatattaagggtgcttgtttcgtatgatgaagaacttgcaattaaagccaaggcactttttattacaatttacagtaataatcaaaaaaaagaaaaaacttcaaaacataggacatcaaagaagaaaaaaacaaaacactcagaagaaaatattttttctgtaaacgacgatgaagccaagaagcttacggaaaatgagaaaaaaccacagattaagatggctgaggctgtgagtgacactaaagaagatacacaggctgttaagaaaaatgtggaagatattaaagagtctgcagagagtcttaaagagactgtatcaaaagatgaatttaagaccacacagaataagaacttctttgataaagttaaggataaatgctttgtaatatatacaaagattaaagagataataaaccttgtaaaggatacagtaaaaaaggtttccggagcggctgacaagcttaaagaaaaagtgaagaaggcaaaagaatttgtgacagatgaggataataaggcactttttcatttttttgtggaacagttaaagacacttattaaggttattagacctaagaaatacagaattaatgcaagacttggatttgaagacccggcgacaatgggcaaagtgcttgcttatatatcaatcttttatggtatgtcaggagttgacctttctttagaaccggtatttggtgagaatattaaagagggcagtatattcctgaaaggaaatatacgtatattttcagtgcttgtgatagcattaagagtgtatagaaatgaacagtttaaaaagtttatttccagatagagaaggttatgttataatgttaacagtacttcgcaaaacaaggaggtcaaaatccctctcctcatcataggattcggattttgcttcgcaaaacaaggagggattttatggcagagaataattttgattcaacagttgcatcactttttaaggggatggatgcatttatatcagctaagactgttgttggtgatgcggttacggttaaggatacaattatccttccgcttgttgatgtttcgtttggagttggagcaggagcgtttgcaggggataagaagaataatgccggtggtggaatgaccggaaaggttacaccgagcgcggttttagttattcagaatggtgcaaccaagcttgttaatattaagaatcaggatactgtaactaagattcttgatatgattcctgatgttattgacaaattcaagggtaaggatgaaaaggttgtgactgatgcagatattgatgcagctattgaagatgcagcagagtagtttttcataaacatatgtaatgtgcatattatataacatacttattaaggatgtatatatatgtgcagactgcttggatttatattcttctggattgctgttggaatgataataacactgtttataatggataatgtattcttgtgcgtatgcataataattacattgattgttgtgggttataacatgttctgccagtaatcagaacaatatgttgtgcttttgagagaattttgaagaaaattcttgaaaaatgtgttgcaaaatatttttttatctgatacaataatttctgttgtgggtaaattacccaataccggtaaggaggtgttattgaaatggctaagtgtgcaatttgcgaaaaaggtcctcactttggtaatgcagtgagtcattctcatagaagatctaataaagtttggaatgctaatgttaagtctgttaaagtaaaggttaacggaaatgctaagaagatgtatgtttgtacttcatgcttacgttctggtttagttgagcgtgcataatctatgagctttaaagttaataccagtatattaaggtgaattgcgcaaaacgcgattcactttattttttggacattcatttgataatcaaagtttaataaagaattcgaaaatgtgtttatttttctgtagaaagatagtataatatttgtgctatttatatacatatttttatgtaaagtttgactgcgcgaaacttgcatccgtattacgggtgttaacaaatacaagccgcagtattggaggactatctatgaagggaactttggagaataaacttggaaaagtttcgattgattcggaagttattgcacagtacgcaggttctacagcagttgagtgctttggaattgtgggtatggctgctgtcagcatgaaagacggacttgttaagcttcttaaaggagacagccttacaagaggaatcagtgtggttatagatgagaataatcttattgagattgattttcatgttattatatcttatggtgtaagcattgccgcagtagcagataatcttattgagaatgttaagtataaagtgtcagaatttaccggccttgagattaagaaaatcaacatatatgttgaaggcgtaagagtaattgattaattgaaatattgttataatgcttaattgcagaatggaggataatcgtggcaactaatacaatagatgcagcacttgtgcagaagatgtttcttgcaggagctaaaaaccttgagtctaagaaagaatggattaatgaccttaatgttttccctgttccagatggtgatacaggtactaatatgactcttactattatgtcagcagctaaggaagtaagttctattgctaaccctaatatggagaatctttctaaggctatatcatcaggctcgttaagaggtgcaagaggtaactcaggcgttatcttatcacagctcttaagaggctttactaaagagatgaagggcgtaactgaaattactgttgagacacttgcacttgcaacaagcagagctacagagacagcatataaggcagttatgaagccaaaggaaggaacaatccttacagttgctaagggtatttctgataaggctgctgagattgcatcacagacagatgatattgaagaggctatgcgtataattattgaacatgctgaatatgtactttctaagacacctgatatgcttcctgtccttaaagaagcgggagttgtggattcaggcggacagggacttgttgttgttcttaagggaatgtatgatgcacttacaggaaaggttacagatttttctataacagagagtaagccatccactgaacagacagttccaggctcgggaaagggagctgctgtagagaatgtagatataaagttcggttattgcaccgagttcataattatgcttgataaggaatttgatgagaagactgaagcagacttcaaagcattccttacatcaataggtgattctatagtatgtgttgctcttgatgatattgttaaggttcatgtgcatactaaccatccaggtcaggcatttgagaaggccttggaatatggtcagcttactaagatgaaggtcgataatatgcgagaggagcataaccagaaggttgttgcacagtcagaactgcaggcggcagcagctaagcaggctatggagaaaaattctgaagctgaacagaaaaaagctgagccagctaaggattttggatttatcacaattgcaccgggaagcggaatcgcagagatttttaagggacttggtgttgatgaagttattgaaggcggccagacaatgaacccttcgacagaggatatccttaatgcagcagataagattaatgccaagacaatatatgttcttcctaataacagcaatattattcttgcagctaaccaggcagcatcaattgttgaagacaaggaacttattgttatccctactaagacagtaccacagggaattacagctatgattaactttgagacaacacgcagtgctaaggataatggtgatgcgatgacagacagtctttcaacagttaagtctggacagcttacttatgctgtaagagatacatcaattgacggcaaggagattaagaagaataattatcttggattaggtgataagggacttgctgcagttggtactgatatggatgagactcttcttgagatgattgagtcaatgatgtcggatgaagctgaacttataagtgtttactatggagctgatgttgaagaagctgctgccgaggcagttgtttctaagattgaagaaaagttccctgatgtagatgttgaacttcagtttggtggacagccggtttattattatattgtatctgttgagtaagaattatgaatataacagaattaaagggaatcggtgctaagacagctgagaattttaacaggctttcggtatacacagtatcggatctcgtggggttatacccacgggattacgatgtataccatgagcctgtttttgttaaagatataagccgtgaatcagagcatacagaggtagctgttgaaggacaggtatgcaaaagcccggatatatatgggagcggcaggtttaagatattaactgtgactataaaggattataatggcgactccataaaatgcagctggtataatatgccatttttaaagaatacattaaggcttggaacaagatatgtattcaggggaaggctggttaataaaagaggctggttattagaacagccgaaaatgtatacacttgcccagtacaaggaacttcagggaacactgcagccaatatatcctctgactaaaggtcttactaacaatactgttactaaggcagttgcacaggcacttgaaaaatacagcgcgggacttgaaaaggaatatatacctgattatataagaaagagatattcgcttgctgagcataatttcagtgttgttaatatacattttcctaagacaatggaagaatatgttcaggcgagacacagacttgcgtttgaagagttttttttattcacgctagcaactctttcattaaagagtgcaaatgaacgcataccgaacagctatgtaataccagaaagtaaagaaaaggatcaattccttgaaagcctgtcatattcacttactaatgcacagttaaggactgtgtcagaggttgcacaagatatgtcaggtgaacacctgtgcagccgtctgatacagggggatgtaggctcaggaaagacagttgttgcaacaattgcacttatcaatacggttattgcaggatatcagggagcattgatggcaccaacagaggttcttgcaagacagcattatgaatcgtttgttaaaggctttgaaaaggcgggacttgatatcagagttgaacttcttgttggttcaatgacagcgaaacagaaaaaggaagcatatgcaaggattgcagatggaactgccggaataatagtaggaacgcatgcgttgatacaggaaaaggttgaatataaagaactggcacttgttataacagatgagcagcacagattcggagtaaaccagcgccgtgacttttcacagaaagggaaaagcccgcatattcttgtaatgagtgcaacgccaataccaagaactctggcaattatactgtacggtgaccttgatatatcaataattgatgagatgcctgcgaacagacttcctataaagaattgtgttgtggatgaaagctacagaccgaaggcgtatgcatttatacacaagcaggttgcttctggcagacaatgctatgtaatatgtccaatggttgaggacagtgaggctgtagaggctgaaaatgttgttgattacacggcaatgcttaagaaagaacttccggatataaggatagaatatcttcatggcaagatgcgtccatcgttaaagaatgaggtgatggaaagatttgcagcacatgaaacggatgtgctagtttcaactacagttatcgaggttggtgtaaatgtgcctaacagcactgttatgatggtagagaattcggaaagatttggacttgcacagcttcatcagttaagaggccgtgttgggcgaggagaatatcagtcatattgtatatttgttacaggcaataagtcagagaagataagaaaaagactggaaattcttaataaatccaacgatggattcaagatagctgaggaagatttaagactgcgtggaccgggagatttcttcggggtaaggcagagcggtgattttgatttcggaatagcagatgtatttactgatgcaaagaccttaaaggaagcgtcagatgcagcgaaagatatgctaaagaaagatcctgagttaaagcttgagaataatgtatatctaaagcagaaggttgcagagtatacgattaaatgtttagaaaagattaatctgtaaaggagatgtatgcacatgagacagatggaattcacaatgagcagacctaatcttgtcaagccaggagatgaggtagatattacggagggtaagcttcctagcagttattattatacgatagagccggcagttgcaatgtcaggaaattattcaacacctgacaggttaaagtcaagacatggaattgttaaagaggttggagagacaagcaggggttattatgtgcttgcggaatttgatgaataattgcgactattcggaattaagcaaaattacaattaaatgcagaataaaaattatgcttttcacatatattttttacaagtatatgcggaaggcataattttttatgtaccgctttaattacagggaggaaagtatgtcagacagaaaggaaaatataaactttaatctgtacgaggatataaagaaacgcactaatggggagatatatcttggtgtggtaggtcctgtacggacaggaaagtcgacatttgtaaaaagatttatggatctatgtgtaattcctgagattgcagatgctaacgagaaacaacgcacaatcgacgaactgccacagagtagtgctggaagtacgattatgactactgaacctaagtttatacctggtgagagtgcagcaatatgcatggctgatgatattaagattaaagtgcgtgcaattgactgtgttggatttatggttgatggcgcaatgggagcagaggagaatggcaaagagagaatggttaatactccatggtcaaaagatccggttccattttcaatggcagcacagattggtactgaaaaggtgatagaggagcattctactattggaatcgttattacaacagatggctcatttacaggaatagaacgggataattatgtcaatgcggagcagatggctatagataagctgaaaaagatttcaaaaccgtttgttgtgatattaaactgtgtgaagccatatgctaaagaatctgtgcagcttgcagaagctatgaaagaaaaatatggtgtaaatgtctatgctcttaattgtgaccagctaagaaaagaagatgttgacagggttatatcaggtgtgcttaaagaatttccggtatcacagcttgatttttatgcccctgcatgggttgaagtacttgagtcatcacactggcttaagatgcatatagtagatgcggcactttcaattcttgataatataaatgttatgaaagatgcgtatcttgagttgaataatacatgcgaatacatagaaaagattgatgtgaaaaatgttgatatgtcaacaggaagggttgaaattgaatttaagctttcgaaagatttgtattataaaatattaagtgaacttacaggaacgcagattaataacgagcatgagcttatagatatgataaaatctctttctgacaagaagaatgaactgggaagctttggtgatgcaataagtgaggttaatcttaatggtttcggagttgttactccttcgaaagaaaatatacaacttgatgaaccggtagtgattaagaatggcaataaatatggagttaagataaaagctaaagttccgtctatcaacctgcttaagacggaaataatggttgaaattgccccgattgttggaaacaggaatcaggcagaagatctgattgaatatataaaaggaaatatgaaagacaatccggatggaatctgggataccaatatatttggaaagacaatagaacagattgtatcagacggaatatatgaaaaaacgcataatatgacaactgagagtatgggaaagattggtgatacaattgaaaaggtaatgaatgagaattcgggacttgtgtgtcttattgtgtagaaagtgctttatttaactgaaaagttatgataatatatatgtaattatgattgaacgacaagaggtttgcaatggaaaagaaaggaactggagctgaacatgtaagttacagacataatgtgtttagaaacaaaatgcttggctttgagaaaatattatttatcataatggtattggttaatatcttatatattatagtatcgtttgctgataagaatctgccggctataatgacagacgatataataagactaatatccgttacggcggtccagattataagctgctgctcattcagaataattaattccagagataatttttctaatgaaactaaaaacaggatgtgttgtatttcactggtagggctgtttgctgctgaggaacttttattttatttttgtgagcccttatgggttggaacagcagtagtaatggtgataagttcattctttaatgacagaaagaccatttttgttatatatgctacatcaatagctgtatggattacatcagcatttatgtataattacggtgtcaccagtgcagggaaggcacttgatgtaagagattttgtagctacatttttactgataagctgtgtacttgcaatatcggttatattgtataatttcaataagctgcaggtggaagatgttgttgaatattatgatggcgagaaaaagcttcaggagaagctttcaacagattatctgacacagcttcatacaaggttttctatatatgagaacatcaagcaggcaatgcatgattattacttttcagggaaagatgtatgtgttgcgatgcttgacattgacttctttaagaaggttaatgacacatatggtcatgacaaaggtgatatggtattaaggacattatcacgggttataagccagtacactgatgatacgattcatgcaggcagatacggaggagaggagtttctgattcttttttcgggatataccagaaagcaggcaggaaagatactggaaggaatgcttactaattttagaaatcaggagtatgatttcttgcctgaagatgttataataacattcagtgctggctttacatatcttgataataaaaatattgatgtggaaggcttcataaaatgtgcagatgaggcactttattattctaaagagcatggaagaaaccagataacatactataatgatctgagattacgagacatgcaggttaacagataaccaaggaggatttatattagatgaacaagaaagttgaagattatgtgagaagtatacctgatttcccggagccggggattatattcagggatgttacaagtgttatccagagtcctgagggattaaagcttgcaatagacggtcttacagatcttataggggatacagaatttgatgttgtagtaggaccagaatcaagagggtttatatttggcgttcctgttgcatataatactggtaagggatttgttcctgtaaggaagaagggaaaacttccgtgtgagactatatcagcagattatgagcttgaatatggaacagctactatagagatgcataaggatgcgattactcctggacagaaggttattattgttgatgatcttattgctacaggaggaactacagaagctattatcaagcttgtagaagagcttggaggagaagttgttaaagtccttttccttatggagcttgaaggtcttaaaggaagagataagattgcaggatatgatgtcgagtcagtaattaaatacccaggtaaataattattcgggctgctttattatataaagcagcctttttaagattgataacaggaggcagatatggggacaccacataatgaagcacaggcaggagatatagcaaagacagttcttatgccgggagatcctttaagggcaaaatatatagcagataattatcttacagatgtaaactgctttaatacagtccgtaatatgtcaggattcacaggaacttacaatggatgcagggtatctgttatgggaagtggcatgggaatgccgtcaatgggaatatattcatatgaattatataatgtatatgatgtggataatattattagaataggctcagcaggtgcatttgatgatgaccttaatcttatggatatagtgcttggaatgggctcatgcactgattctaactttgcggtgcagtacaatcttccaggcacatatgcaccaatagctgattttacgcttttaaagacagcatatgatgttgcacaagaaaaacgctttccggttaaagtgggtaatgtactggcatcagatgtgttttataatgatgatgcaacagttaacgaccgatggaagaagatgggagtgcttgcggttgatatggagtcagcagcattatatatgactgctgccagatgcagaaaacgtgcacttacaattcttacaataagtgaccatctctacaggggtgagaagctgtcagcacaggagaggcagacaggatttactaaaatgatggagacagctcttgaaactgcagttagattgcagaataacaggaagatggaggatttatgacagatacagatttagagattattgtttttgtactgctggctgttgcaatcggcgtgtgtgtatgtgtaagcagcagtattaagcggaagaaggcagcggagaataccataaagaaagcgtggggcaaacgtgctgtatacaagggaacagatgagagttttgaatatatatcgcattatgccaaaggtaatccgagtgaatctatgattgatgatataacatggaatgatcttggcatggatgaagtatttaaatgtattaataatactaattcatctgttggacaggaatatctatataagatgttaagagaaccggttgcagatgcagaaaagcttcacgaactggacaggcttgcagatgaattcacagctaatgaaaaagaaagaatcacaattcagaagatatttatgaatatgggaaaaagccgtaagattgcagttacagattatatcggttatataatggatatagagcagggaagtaatattgtgcattatcttgcgtgggtatttcttatagcttcaattcttgttacggttcttgtaactccggtgcttggaatatggcttataattgcatcggtagcattttcaataattacttattacaagtataaggctaagattgagaattatttcaaatgtattaatgttattgtgaaaatggcatcggcatctgaagatatatgtgaaagcaatattagttttcttgaaccagagtgtaacaggcttaaagagatattaaagagcttttctaaagtaacaaaaggctcatggatgattgagtcaggcaatgttgatggttcaatcggagagattgtacttgattatctaagaatgataacgcacatggatattgtgaagtttaataagatgacaaagcttataactgccaaaagtgaggatgcatataaccttgtagatacacttggattcatagagacatcaattgctgttgcatcattcagggaaagcctgccattttactgtaagcctgaatttgtggaaaatactaataaccttagtgtgaaagaagtgtatcatccgcttatagataatcctgtgtgtaattcaataacaactaaaggaaatgttcttcttacaggttctaatgcttcaggtaaatcaacatttttaaagacaatagcaatcaacagtattctggcacagactataggaacaagtctttccaaagaatacattgctccggtatataggatatattcttcaatggcattaagggatgatcttgctaattcagacagttactatattgttgagattaagtcattaaagagaattcttgatgcggttgataaaacaggaagaccagttctgtgttttattgatgaggtgcttcgtggaactaacactgttgagagaattgcagcatcatcagagatattaaagaatcttaatacaggcagggcgttgtgctttgcagcaacacatgatattgagcttacaacaatacttaaggactgttacagcaactatcattttcaggaggaagttactgaggatgaggttaagtttgattataagctgtatgccggacctgcaacaacaaggaatgcaatcaagcttcttaatgttatagggtatgataagaatataattaagggagcagaacagcgtgcaatgcatttcctgacagatggaaattggaaatcttgataaatgttgtttcttgtgatattataaattattgcgaaggcttttattataattcgtggaggtaataatatggttgggttagtcggcgtactcgtaggtgagatagcttacgaagcggtaagatttattataatgcttgcgttactggtacttgcagtattcgtaggtggtaagctccgaaaggcagcagatgccaagaaggcagctaagatggctgcatcggagaataaagagaaagagattactgaataatcaggaggaagttaaagtgcagtacagaggtgtgaatgaattaagaagattataccttgatttctttgagagcaagggacatttgaagatgaagagcttttctttagtaccacataatgataacagtctgcttatcattaattcaggtatggctccgcttaagccatactttacaggacaggagattccaccaagaagaagagttacaacttgtcagaagtgtataagaacgggcgatatagagaatgtaggtaagacagcaagacatggtacattcttcgagatgcttggcaacttctcatttggtgattattttaaggacgaagctattcactggtcatgggagttcttaacagaggctgtaggacttgatccagacagattatacccttctatatatcaggatgatgatgaagcatttaatatatggaataaggaaatcggtattgcacctgaaagaatattcagatttggtaaggaagataacttctgggagcatggcgctggtccttgcggtccatgttctgagatatattatgaccgtggtgagaaatatggctgtggtaagccaggctgtacagtaggctgtgactgtgacagatatatggaagtatggaacaacgtattctctcagtttaacaatgacggacatggcaattacacagaccttatccagaagaacattgatacaggtatgggacttgaaagacttgcagttgttgttcaggatgttgattctatatttgatgttgatacattacaggcacttcgcaacaaggtttgtgagatggctggagttaagtataaggaagatgagaagcaggatgtctctatccgtgttatcacagaccatatccgttcagtaacatttatggtaagtgatggaattatgccatctaacgaaggaagaggatatgtcttaagaagacttttaagaagagctgcaagacatggaagacttctaggtattgaagaaaagttcttatctaagctttgtgaaactgtaattgaaggctctaaggacggttatcctgaattagaggaaaagagaacatttattactaaggttatctctgaagaagaagataagtttaataagactatcgaccagggattaagcatccttaatgatatggaagctgaacttgcttctaagggtgaaaaagtattatcaggagcagacgcatttaagctctatgatacttacggattccctattgatcttactaaggaaatccttgaagagaagaatgttacaattgatgaagctggatttaatgcagctatggaagagcagagagttaaggcaagaaatgcccgtaaggtaactaactatatgggtgcagacgcaactgtatatgatgagattgaccctgctataacaagcgcgtttgtcggatatgacaagcttactaatgaatctgagattacagttcttacaacagaggaagaagttgttgacgctttatctgagggtgataagggaactgttattgtagatgagactgtattctatgctactatgggtggtcaggaaggcgataagggtgttattaagacatctgaaggagaattcgctgttgagactactatcaagttaaagggtggcaagattggtcatgtcggaactatgactaagggcatgatgaaggttggagatactgcaacaatggaagtttcccctgcttacagagcagatacatgcaagaaccacagtgcaacacatcttcttcagaaggctttaagaattgttcttggtgatcatgttgagcagaagggttcatacgttgatcctgacagattaagatttgactttacacatttccagagcatgactaaggaagagattgctaaggttgaagatattgttaatgaaaagattgcagaggctattcctgttgttactgatgtaatgacaattgaggaagctaagaagacaggagctatggcacttttcggtgagaagtacggcgataaggtaagagtagttgctatgggagacttctctaaggaattctgtggtggtactcatgttgctagtacagctaatatcagacttttcaagattgtatctgaggcaggtgttgctgcaggtgtaagaagaattgaggctcttacagataagggtgttatgaaatactacgctgaacttgagaagactattgaagaggcagctaaggcagccaaggcagagcccgtacagcttgttaagaagattgcagctatgaatgatgagattaaatctcttatgagcgagaatgagaagcttaaggccgagcttgctaataatgcacttggagatacagcaggagatatcaaggaagttaacggagttaagtatatcgcaactaaggttgacggcgttgatatgaatgaattaagaaaccttggcgataagttaaagggtgagattggttcaggagttgttgttatcgtcagcgcacagggtgctgataaggtaagcgttattgcgatggcaacagacgatgttattgccaagggtgctcatgctggtaatcttatcaaggctcttgcgcctattgttggcggtggcggtggcggccgtcctaatatggctcaggctggtggtaagaaccctgccggtattgatgagcttattgctaaagtacctgatacaattcttgcacagattggataatttgttactgttcagagctatgcaaaatctgagagatacacataaaaatgctggcatttttatgtgtgtttatcagattttatatggcggatacgccacatctcgaaaatacacagtattttcgagatagctctgaacagtaatgataatatgcaagattagtgtaagattagataatttgggcttgacgatttgcaaaaatgtgatataatgttttttgtgcgattagtaaataccctatttatgtagtttggcgcacaatttgcaacagaagggtggtcaggaagtagtatgtcaaatgtcatcgttaaagaaaacgagtctttagatagcgcattacgcagattcaagagaaactgtgctaaggcaggcattcagcaggaaattcgtaagagagaacattacgagaagccaagcgtaagacgtaagaagaagtcagaagcagctagaaaacgtaagttcaactaataattaatatttttgacatgagagagcggtgcgtaagtaccgctctttttgatgtgtgagttttttggggagggtagagaaatagggagaagccagcggagagaaaaaacgatggattggacgttgaagcggaggaaaggtgtgctgaagtccaaaattggagtagaaaagtagcggattggacttccgctgcgccacacaccacttcaacatccaatcacaggcatatatttttcacataccgcatacaatataaaaagattttggaagtctgcttatatggtcgattttatcagcagcggtataaggctcggacagatgtgtgatcttagcagagatgttgttgcaggacttcctgttatatcaatgctgggtgactgcgaggtttttatagagaattacagggggatacttgagtattcaagcgaatatcttaaggtttctacaaggataggcaatataagggtaagcgggagcaatcttgtgatataccatatgaatcaggacgaaatccttcttaggggacgcattggcaaagtttctctaaaaggagaggctgatgaaaaggatacataattatattgttattgaaatatccggatgggagcgggaaaggttcgttaatctgtgctgcaggcgcgggattacattatataactgccagtgtgtgaaagagacaataagagcgagaataacaagacaggattatttcaagactaaggaaatgcgaagaaaatgtcatgttcatattaaagttttaaagaaacatgatatagagtttctttttgctagatacagaagaaattattcgataattgctggctttgccactgcatttgtattgatgttcattgccagcagattcgtgtggagtattgaatttgacggaaattacatatatacagatgattcaatgcgtaggtttcttaaagagcatggcatcagcacaggtgataaagttaagaatatagatacagaaaatatcgagaaggcaattaaaaatgaactgtcgcaggttacatgggttaatgtacggattgagggaaatattctgaaagtcagcattgatgaatctaaagctgatgagctacacagcaccactaatgatggcaatataatatcaggatattccggtgttattgaatacattataaccagaagcggaacaccgaaggtcactgttggtgacgaggtatcagaaggcgacatacttgttgagaatacattgtatgttcctgatgattacgaggagaacatacagcaattccagacgcaggctcaggcggatattctgataagaacgcagttatcatgggataatgagataaatgcggtatatgccgataaaatatatactggacgaaagatgacgacatatgccataagcatagataaatatgaaatttctctcggctttccacgacatttaaaagagtatgacaaggttgttactgaggggaatataaagattggtaatctgattgcacttcctgtatctgtacagaagattattcttaatgagtataaggaaaatgaggctgagtacagtgaggaagaagcagcggctattcttaatgaaaaagctgagagatttataaaacatttgaaagaaaatgaagtgcaaataaatgattatcatgttaatatagaaagaagcggggataagtatattgcacatgctgatattgatgcaactgttcctgcggattttgatgttagaaaggtggagacatctgatgagtgaggtagagagtcttattaatataccggtagaacactgctccaatatatttggacagtttgatgaatatgcgaaggttatagagaaaacacttaaggttacgattattgtaagagacagctctgtgaaggttataggtgcagaggcagcagtgcagagagcatcaggagtacttaattatctgtatgagctgtctaagagaggcaaccagattacaagacagaatgttgattattccattgcacagtcatttgaagaaaaggctgattcactgattgagattgattctgatacagtgtgcaggacgattgcagggaggcctatcaaacctaagacattcggacagaaggaatatgttgatgcaataagggataagatgattgtgtttggtgtaggacctgcgggaacaggtaagacatatcttgcaatggcgatggctattaatgcatttaagaataatgaggtcaacaagattattcttacgagaccggcgattgaggctggtgaaaagcttggattcctgccgggagatttgcagagtaaggttgatccgtatctcaggcctctgtatgatgcacttttccagattatgggtgcagagagctttaatgctaatatggaaaaaggtcttattgaggttgcaccgcttgcatatatgagaggccgtacacttgacaatgcatttattattcttgatgaggcacagaatacaacacctgcacagatgaagatgttccttacacgaatcggattcggctcaaaggttgttgttacaggtgatatgacacagaaggatctgccaagggataccgtgtcaggtcttgaggttgcgactaaggttttatccaaggtagaagagatagcatttataaaacttacgaataaagatgttgtaaggcatcctcttgtacagaagattgtcaaggcatatgaggattacgaggagaatcaagctaaggctgccaagagaagagaagcaagaaagggaagtcagacaggaaggagaaaagattgatatgactattaatatagagtacgaagccgaggaaaaacttgacttagattatgagaagataattactgatgttgtcaatgaggcggttgattatgaaaaatgtccttatgaagcagaggttaatgtaacaattgttgacagtgaatctatccacgagattaataaggaatacagaaatattgattctccgacagatgtactttcatttccgggagttaattatgttacaccttcggattttgatgcaattgaggatgagttagaaaacaatgctgaggattatttcaatcctgatacaggagagcttcttcttggagatattgttctgtgcgttcagaagattaaggaacaggcggagaagtatggtcattctgaaaaaagggaattggcatttcttacagcacacagtatgatgcacctttttggttatgaccacatgacaccagaagaaagtgcagttatggaagcaaagcagaatgaagtacttgaaagacttggaattacccgttaagaggtgacatatatgacagataatgaacttgttgctaaagctaaagaggcacttgagtactcatattcaccgtattcgcattttgcagttggtgcggcacttttaagtactgatggacaggtatttacaggctgtaatattgagaattcttctttcggggctactaactgtgcagaaagaactgcaatatttaaggcggtcagtgagggtgtaaaggattttaaggcgattgcaattgtgtgttcaggagaccagccagcctatccgtgtggaatatgcagacaggtcatgtccgaatttttcaatcctgatacaagaattattattgaagaatgcagcgggcttaagacttatacgatgagcgaaattctgccagacagcttttcgttatagtataattttgcttataaatgttaatacttcccagtaaggacaacttacaggagggagtattgatgaataagaaatcattctggctttatgttgtgattatgactatggctgtaatagctgtagtacttgcaatatttatacttgtggtaacagataataagaagccttctaatcagcattttaaagaagaggtaagctcgcaggtgactaaagtaactgaaagtgaagagtaccagtatgtgcttaagtacgaaagagaaactttaagaatatacagaaatattgcggatgaaggacgagaagtgttctatgattatgcagatattaacattgattcacttccagatgatataagagaaagactgactaaagggatatattttgaaggagaagcacagctgtatgattttctgcagacatatagcagctagaaaggatatacatttacatggttaagattatttcggacagtacaagtgatttgactaaggaacttatagacaagcttgatatatcagttattccacttcacattctgctaggcaatgatgaatacagggatggaattgatattacgccagataagatatatgaatgggcagatgagaataagacaacacctaagacatcggcggtgtctattgatgatacaatagagatgtttaaatgtgttcttgagaaagaccgggatattgtagcatttgcaatatcagaggatatgtcaactacagctaatgtgttcagacttgcggcaagagagcttgaggcagaggacagcattcatgtaattgactctgagaatctgtctacaggaataggacatcttgttgtcgaggctgctgttatggcaggaaaaggcatgtctgcagctgacattgagaagaatatattagaattaagaccgagagtcagggcaagctttgttgttgatacgcttacttaccttcacagaggaggaagatgcagcggactggctgccatggctggcggtgtacttaaacttcatccaagaattgaagttaataatggaaagatgagccctggaaagaagtacagaggacgcatgaagaatgttgtactggattatgttaaggatatggaagaagaccttaagaaggctaagaaagaccgtgtattcattacgcactctggctgtgataaagagatagttgatgaagtaaagaattatcttaaacagcttgatgtatttgatgaaatatatgaaacaagggcaggcggcgttatatcttcacattgtggtccgggaacattaggagttctttttattgcaggtgagtaattttaggagaaatgtatggctaaatttacgaaaaaagcgataatggactgttttcttaatatgctaaagcgtaagaatattgacagggtaacggttacagatatatgtgaggaatgtggaattaacaggaatacattttattattatttcagcgatatatatgatgtgcttgacagtgttcttatagaagagacagaaaagaatattgatattacggaagatgcaactttttatgagacatatagtaaggcagcttctgttattattgagtatcgtgcggcagttattcatgtgtataattccagaaacagggatattattgagaaatatctgcataatacaacagaatatcttgtaggactttttgttaagaaatattctaaagaccataagcttacagaagatgacagagagtatataacatgcttttacagctattctattgttggaattgtgtcaagatggattggtgaaggaatgccgccatatgataaagatcttattaagcgtttttctgaatcatttgatgcaacgattgatacaatgattaatctgtgtgaagctaataattagttattaaaaacagacaaaacatgtaaagtgttcgattttgggacaaagtacatgctttgcctgtttttttatttagagaaaaaatgtatgctaaatacaataaaaacggcaaaaataaataagaaagcatagaaaggtggaaaagattatgagcaaaaaggcgttaaaactaggagcagcttctattcttgcactgggggcaggtgcggcagttgtatcaaaaaagaacaaaagggatgaacagaggaaagcgactaaagacattcaggaaagagcacataaggagtttcgcaatactgaaagaggaaaatatactaagaatagtaagggaatatattattctaatggtaattatgaagcatttgcaagaccggaaaaaccggaaggagttgatgataaatcagcttatattgtaggaagcggtcttggtgcattagctgcagcgtgctttcttgtaagagatggacagatgaagggtgagaatattaatatacttgaggctatggatattgcaggcggtgcatgtgatggaattaatgatcctacaagaggttatgtaatgcgtggcggacgagagatggagaatcacttcgaatgtctgtgggatttgttcagaagtattccgtctattgagactccgggagtttctgtacttgatgaatattactggcttaacaagcatgatcctaattattctctttgcagggcaactgtaaacagaggtgaagatgcacatactgatggcaaatttaatttaagccagaagggctgtatggaaataatgaagctgttcttcactaaagatgaggatctgtacgataagacaattgaagacttcttcgataaggaagtttttgactcggatttctggctgtactggcgtacaatgtttgcatttgaaaactggcatagtgcactggaaatgaagctctatatccagagatttatccatcatataggcggacttcctgatttctcagcattgaagtttaccaagtataaccagtatgaatcacttatcctgcctatgcagaaataccttgaagatgcaggcgttgagttcaggtttaacacaagagttgataatgtaatatttgatttcagggacggaaagaagattgcaaaaactattgagtgtactgtaaaaggtgagactaagacaatttatcttactgagaatgatttggtgtttgttactaatggaagctgtacagaaggtactatatacggcgaccatacacatgcccctgttggtaatgcagaagtaagaacaagcggatgctggagtctgtggaagaatattgctgcacaggacagttcatttggacaccctgagaagttctgcggtgatatatcaaagtctaactgggagtctgcaactgttacaacaagtgatgagaagattatttcttacattaagaagatatgtaagagagacccaagaaccggaagtgttgttacgggcggaattgtcagctgtaaggattcaagctggcttttaagctggacaattaacagacagggacagtttaaggaacagaagaaggatgaggtgtgtgtatgggtatacagcctgtttactgatgttgacggagattatatcaagaagcctatgaaagaatgtacaggtgaggagattacagcagaatggctgtatcatcttggtgttcctgtcgaagagattgatgagcttgccaagaatcactgtaacactacaccgacaatgatgccttttattaccgcatttttcatgccaagaagaaaaggcgacagaccagatgttattcctgatggctgtgttaatttcgcattccttggacagtttgctgagactccgagagatacaatatttacgacagagtattcagtcagaactgcaatggaggctgtatatggcctgcttggtgttgacagaggtgttcctgaggtctggggcagtgtatatgatgtaagagacctgcttgattcatctgtaaagcttatggatggcaaatcaccattagagattgatttaggacctcttaacggaattaagaaagtgattcttaagaagataaaaggaacggttattgaaaaagtgctaaaagaccatgatgtaattaaagattatatgaaatattagttgaaatatgttgaaacattaagggataccagttaaacttatggctggcatccctttttgcgtggaaataatacatcaggagcagataaaattgaaaaagataactataataactttattattaataactgcattggctgtgcatggatgtgggaataagaaaaatgtttctgataacgaaacggttaaagaaactgcttcgtcggtgatacagcaggaaacagtcaggttaagtacacaggagacaacgacagaacagataacagattcggaaactgcattggaaaagacaaagacatctgcgagtgttgagattgcagattattcgcagatgtctgacgagacagtaacacagactgcagagccagataataacagctttgcagcagattatgcagcagcctcacagtattcccagcttgtaattgtccagtcgcatggcactagggcaacagttacgatgcatgaacagcaggatggtgtatggactgagattttaagaacggatggatttgtaggttctaagggagtaggtgaggcgagtgaatatacatctgctacgccgcaaggtacatttccattgtattttgcatttggcattaatccaaatccaggaacgaaagttccttatcttcaggttgatgagtatgattactgggtaggggattcttcatctcctttatataatcagtgtgccagggctgattcagatgtagactgggataagagtgaatcagaaaggataattgattatccgtcagcttatggatactgtctgtttattggatataacatagaggggactccacatatgggaagttgttactttctgcattgctctaacggaagaccaacagctggatgtgtatcagtatcagaatcagatatggcattcatattaagaaatattggtgaagactgcgggatagtgattgaataatcactatcccaaagctatatcaagaaccatcataagcgcaaagccgatagcagcacctattgttcctatgttgctgtgtttgccgctctgtgattcaggtatgagttcttcgattacaacgtacatcattgcacctgctgcaaatgaaagcagataaggaagaacaggggcgatgaccccagcaataaggattgtgataaaccctccaacaggttctacaattccagacagcactccgcatacaaatgcttttttcttgctcattccttcaccgcgcagcggcatggatataatagcaccctctggaaaattctgtattgctatgcctattgccagtgccatggcagcagcagcggttattccggaatccttcatcattgcacctgcaaatgcaacaccgacggacattccttctggtatgttatgcagtgttacagcaaaaagcatcatagtagtttttgatatatgggcagtcttaatgccttcctggttcttgctttcaatgtgcatatgcggaataactgtatcaagaagcagaagaaagaatattcctgcaagaaaaccgaccagcgcagccagccattcgggtgagttgttccctttacacatatctatagatggtataagcaaagaccataccgaagcggcaatcataactcctgccgcaaatcctaaaagcaatttttcaaactttggggcaatccgtttctttaagaagaacaccattgctgaaccgagcgatgttccaagaaaaggaattgctaatattatgaattcagacataaaagctcctttctatgtaagttagttaaaactaacatgattattatagcattgaaacagatatattacaaatattttattgcaaagtagttatttactgattaaaagttacctataacgactttttaaaatataagtttcctatagcgactttttatgatagaatgtttctatattcgttggaggtatcaggcgtgggaaatgcagttgataagggaagcggctttttgtttcatctgaacaggcatgtggcagatagtgaaactgacaagcataagcatgattatgcggaacttttatatgtgtcagacggaagtcttacgcagcatgtgtgcggtgaagatgttgatatgcgcatgggtgatgtgtgccttattaattctggatgtatgcattatgaaagttttgaagaagatacatttgttataagacttgaaatatctaatacaattattgatgccctgataagtaattctatggctgataaacaggcagtggattatattaaggaactgcgaaaagtattaaagaacagtgaatatatacattttgcttttaaagataattatgataatcagttaaaagatatactgacggctcttataagtgagtgtggtgtggcggacatggcgtctgcatatatatgtcagggtcttatgctcaggattttctggcggcttggtacagtatatgagtatgcacagtcaagatacataagaaagaagataaactggcttttacataaggaaatcacagattatattgaagataatatgaaagatgttacaatagatatgcttgttgagagattcgggtatcaggaggattattttaacagattcctgaaagcacagacaggtatgactttcacggaatatctgcagaattgcagattgaataaatcggccattctcttaaaagaagattcaatggatgttgatgagattataaaggaagtcggatatagaaataaaggatatttttacaggatatttactgaaaagtataacatgacacctgcaaaattcagaaaatatataaaggataaggagtttacaatatgagtgatacatataacaatccggtacagagaggatttttcccagacccttcggtagtaagagttggagatgactattatatggctaattcaacatttcagtatttccctgcaattgcaatcagccattccaaggatatgattcactggcatgtaattggacatgcaattacagattcagaagaacttgatttaagagatattaaagactcacatggcatatgggcaccggatattaattatgttgatggtaaattcattataatggcaactttaaggcttaacggagatggcaaaagagataataatgtattaagacgccagcttgttgtaacatcagataagccacaaggaccatattcaaagccagcctggcttgaggttgataatattgacccatctttatttgttgatgatgacggtaagaagtatcttcttataagtccgggaatcaatcttttaccactcagtgatgactgcactaaggttacaggtgaaagtgtgtgtgtatggccaggaactggagagagatgtccggaaggaccacacatttttaagaagggcgagtattattatgcaatgcttgcggaaggcggtacaggctatggacatggaatcaatgttgcccgttcaaagaatctgtatggaccatatgaggaatcaccatacaatcctgtattgagacagtttaatccagatgcaccgattcagagaacaggacatggcaatataattgagacacaggacggaagctggtggtgctattatctgtgtggaagacctaatcagggcaactatacaacaataggaagagagacagcacttgaccctgttacatggctttcagacggctggttcgtgattaatgacaggaaagggccaagccttacacagaaaacacctgaattacctgaatgtacatttgaaaagtggacaagagatgattttgatgatgatactcttaatcttaactgggaatttgtaagaaatcctgttaagggtaattattctcttacagaaagaaaaggatatttaaggctctggacaatggatggaactcttaatgagataagggctaagaatactcttgtaagaagagaacaggaactatcgtatacagcacatacaaaggttgacttctatcctgaaaaggatggagaacaggcaggtcttacctgttattacagtactgcgacttatgtaagattgtcattgtgttatgaggatggaagaaaattgcagcttgtgattaacagaaaccatggcgaagaacttatctcacaggtggacaatataaaggagcagagcatatacttaaaggttgtagttgataaactgacaagaagctttttctacagctatgatggtgaacaatgggaaccagcaggagtgcttgaaaattgtatatatctgtgtgatgagggtgtgcctgatgacagaaagcgtcatacaggaacgcttgttggaatatatgccaataatggtggctgcggaagcaggattccggcagattttgattattttgaatatgaggactagattttatgagttttgattgtgtggttataggcggaggtgcagctggaatgatggctgccatacaatgtaaagagaataatatgcagactgtgattatagaacacacagcaaagcttggaactaagatattaaagactggcaatggcaaatgtaatttttctaatacatttatgactaaggaaatgtatcagaacaataacgcagattatgcgatgaggattattaacaggtttaatgttgatgatacaatacatttttttgagaacttaagtgtatataagaaggaacgtaatggttatctgtatccgaggtcagagatggcggtttctgtggctctggcgcttacaggaaagatacaggcacttgatattccggtttttttcgagacatctgtaaaaaaaattgacagggcaggcagcgaatatgtgttacagcttgaaggagcgaagactaatacaattaagactaagacagtgatacttgcatgcggttcggcagcttcaccgtcttctggttctgatggaagcggttataagcttgttaagaagcttgggattaaggttgttaagcctcttccggctcttacggcacttgaatcggacaagaagaatatgaagcttgcaacgggtgtaagagcatatggtaatgttaagattatggcagcaggcagagtggttgctgaggatactggcgagattcagtttactgattatggaatatcaggaatccctgtttttcaggtgagccgttttgctgtcagggcgatggaagaaggtcagagggttgaagcacttgttgatgtggcagcagatattaaagaagatgaccttttatcaatgctaaaatgtgctgttaatacaagaaagcatcagtcagtaagcgaaagcttgtcagggttgtttaataaaaagcttgtaatgatgatatgtaaggatattggaattgagggcaattcctcggcttctgatatggatgacgacatatgccagaaacttgtcagacatatgaaatccctccgctaccatataacaggatataagggaaatgattatgcacaggtctgtcagggtggtgtcaatgtatcagaactgaatgataatcttgaatcagttaataatcctgggatattctttgcaggggagcttgtggatatagacggcagatgtggaggttataaccttcagtgggcatggagcagcggcgtggttgctgctaagtcagcgtttgattattgtaacagacaggaataagaataatggaaaagaaatgtattaagattagtaatataaagatatctcctgataaagatacagcatttttagaaggaattataagaaaagaattaagacttggaaaagatgcacagattgattatgaaatagcaaaaaggtcacttgactgcagacataagcctcaggttatgcgtatatacagtgtcgaagtgtataaggtggtgcgttccggcagggaagaaaagcttgagaatataattaagaaatcaggttgtaaaaatgctgttatgtctaaaagggttatctataagtttcctgttaatgcgacagaaaatgttaatgaagatgaaagacctgtagttatcgggtttggaccagcaggaatattctgtgctcttgagcttgccaaagcggggcttagacctgttgtatatgagcgtggacaggatgttgatacaagaactaagaaggttgcacagttctgggagactggtgagcttgatacagaatgtaatgtgcagtttggtgaaggcggagcaggcacattttctgatggaaagcttaacacacagatttcagatacatttggaagaataagatatgttctgcagagttttgttgaattcggtgcatcagaagagattctgtacgccaataagccgcatataggaacagacgtgcttgcggttgtaattaagaatataagacagcatattaccgcgcttggcggtgaagttaattttggaagctgtcttaaaaagattgagattgaagacggaaaagtgtgtggcgttgtcatatctgacaaagatggcgagtatgcaagaaaatgcagtaaagtgtgccttgcaataggtcacagctcaagagatacatttgaatatcttcacagtgagaatatagatatggagccgaagccttttgctgttggagtaagaatagaacatcctcaggaaatgattaattataatgcttatgctgatgctgcatatgagcttccggctgctgattataaagttacttacaagacaaagaatacagataaagaacgaggtgtgtattctttctgcatgtgtccaggaggttatgttgttaatgcttcatcagagaacggcaggacatgtgttaatggaatgagttattcaggccgtgattcccgcaatgctaattcagcaataattgttacagtcggaccggatgatttcggacatggagtacttgacggaataaaatttcagagacagttagaagcaaacgcttatgctgaaggaaatggaaaagttccggtacagttatttggcgattttgaaaaaaatataacaacaacggaattgggagaggttgagccttgcataaagggtgaatatacatttgctaatcttaggaatgtattaccttcttatgtgacagattcggttgttgaaggtgtgcatggtttttcaagatttatacatgactttgacaggaaagatgccgtactttcgggtgttgagagcagaacatcaagtcctgtaagaataataagaaacgatgaacttgtaagtacatcagtatgtggattgtatccgtgcggtgaaggtgcagggtatgcaggaggcataacatctgctgcagttgatggtgttaaggttgcggaatatatggcagtaacagctgcttgtatgggataatatggactttttaataaaaatatagtaaaatagaccagtatttgatttttttactggagatattaaaatatggggaattatagagagtttataaaagataagaaaagaattgttataaagataggttcatcttcacttatgcatgagcagacaggcagattggaccttttaaagattgaaaagctggtaaggattcttattgatattaagaattcaggaaaagatgttattttagtttcttctggtgcaatagctgtgggaagagctgttataggactttgtgacagacctacagaacttccggtaaaacaggcatgtgcatccataggacaggctaagttaatgatggtttaccagaagatatttgcagaatatggtgcagttgcatcacaggttcttcttaccaagaatacaatagttaatgatgttaacagaactaacgcacagaatacatttaacgaaatcttaaaacttggggcagttccaatcgttaatgagaacgatacagtatcaacttacgagattgaacagctacaggcttttggagataatgacagactttcagcaattgttgcttcaattatcggagcggaccttcttattctgttatctgatattgatggtctgtatacagatgatccaaacactaatcctaatgcaaaatttgttgaaactgtatacgagattgatgagaagcttatgggaatgggtaaagattcatccggtagtaatatggggactggcggaatgacaaccaagcttattgcaggaaagattgcaacactgtcgggggcggatatgattattactaatggtaatgatgttgacaatattatcagggttatggcaggagagaatgttggaacattgttcttagaccacagagcatctgattttgacctgatgtctcttatagattaaggctgattgaagattacttggacgacaacgggaggtcatacatggatattaagctgatgaggaattcggagaagggaatattctattctattaatgacaggcttttaatgcagataacagatgataattatcagtatcagggtcttcagggaaagaaatattttattctgaatgcagcaactaatgaaaaatttgaagtggcatcgcagattaagaagtataatttctgtaaggtgaaatatgcatgccttgaaagaaattatatgttcttcacatcactggaatcagtgactgaaagccgtacacttcttactgtatacaggtttatgttcgatactaatgagaatgaggcagtattcagtatggagatagataataccgatatatctgatggattgagatattatatatttgttatggattctaattatttttttgttgaaaagcttgaaaagaaaggaaaactgatagatatatttctctatgatattaattctgaaacagataatgacatgagtgatacatttgtgaaaaatacaggcatatataaggtacttccaataggtggaaacaattgtgtcataaaattcggggcagacagacttgtatcagatggaactggcggtgaagaaaaaatagctgtacttaatgctaaacagtttgtatcagagatatcgtttaatggtcagatgataactatggaagaacttgatgtgtcagatgaatcgactacatttccatatataaaagcaggttctggaaagattatttattcgaaatataattttaatagtcagtcagaagaaatcattatatatgatgctataacaaaggttaagcaggtgagacttaataataatgttgaacatgcaatggatttaagttttacttatattatcaatgatatcccatatttacttaaaaaagtggataaaagcacctgctttgttaatcttaacacacagaagccagaatacaggcttcattctgatatgaaattcagatatatgaagaatgatattgttgttataacccgtatgagacatcggtttttctttattaagaaagcttctgaatatattgaagcatatagaattttggatcttcatcatcctgtgctttctacaaaggctgtgtataacagttgtgcagaaagcggagatgatttgattatatttactaattagtgacagaggtttgtatggttacagagaaaacattagaaagaattaacgagctttatcataaatctaaagcagagggacttacagatgcagaacttgctgaacagaagcagttaagagctgattatgttaaagctttcagagaaaacttaagaggacagttagaatctatcaagattaagaatcctgatggttctttaatagatgtcaaggcaagacatgatgagaagatgaaaagattggcagaggaacaggcagagaaaggtaactagatggataagaatgaagtgcgtcagcttattatgaactgcagacataaattgtcagatgaagatattgaaatgcagagtggacttataattgacagattgaaaaaatcggacatatataagacatcggaaaatgtatttctgtatatgagctataacagggaagttgatacatatatgcttctttcgcagtgctttatggatggcaagaaagtatatgctccaaaagttttatcaaagacacagatggagttttattgcttatctgatgagaatgatcttgtaagtggttatatgggaattatggaaccgtctgacatctgcgataaagctaagattagagatggactttttattatgccggggcttgcgtttgattatgattttcacagaataggttatggcggaggcttttatgacagatatctatcggaagataatacatttataaaagcggcacttgcttttgatttccagctattagagagtgttccttatgaggaacatgatttaaagccggattatattattacacagacacagtttataaggagggagaattgatggaatcacttgaacagattggaattaaggctaagaaagcatcaagatatcttgcgaagctgggaatagatgaaaaaaataaggcgcttgaggctgttgctgatgcacttacagctaatgcagagagtataattgcagccaatgaaaaagaccttgttaatgccaaagccaacggaatgaagcctgctcttattgacagacttacgcttgatgttaagagaatcaatgcaatggcagatggaataagagttcttacaggtcttgaagatccggttggtgaagtaacaggaatgaagaaaagacctaatggacttgttatcggaacgaagagggtacctcttggcgttgttgcaattatatatgagtcaagacctaatgttactgctgatgcattcggacttactttcaagtctggcaatgcctgtatcttaagaggcggaagtgattctattaattctaatattgctattgcagatgttattgcaaatgcactttctgacaacggaattaacccggatgttattaatcttataaaagatacagacagagcacttgttaaccagcttatgaagatgaatgattacattgatgtaattattccaagaggtggagcagggcttattaagaatgttgttaataacagtacagtacctgtaattgaaacaggtactggaaattgtcatgtatatgttgacgaatatgctgatattgatatggctgtcaaagttatatataatgccaaaacctcaagaattggagtatgtaatgcatgtgaatcattggttattcacaagtctgttgcaaagcaggcaattccacttattgtagatgcacttaaagaaaaaaatgttgaagtgcgtggtgatgaatatgcaatgcagtgtgattcaagaattgttccggcaagtgatgatgactggggaatggaataccttgattatattatatctgttaagactgttgactctgttgacgaagcaatagaacatattaatacatataacacaggccattcagagtcaataattactaaagattacaataatgccaacagatttcttgatgagatagatgctgcatgtgtatatgtaaatgcttccacaagattttctgacgggtttgaattcggattcggtgctgagattggaataagcacgcagaagcttcatgcaaggggtcctatggggcttaaagcacttacaactactaagtatgtcatatacggagaggggcagataagacagtaagctgttttataagtatggggaatttttatgattagaagagattttgatttagaagaaatgaagtattttctgcatcttgtcggacagagtacagatgattatctttatatactggatttaactaatgataaagctgtttattcaaaatcaataactaatgtgtttgcacttgattcagaggaattttccaatgctacacaggaattggttaaagttgttcatccggacgatattgatatgctgatgaatgatatacatgacggaatgaatgggagaaagagcagtcataatttagagtacagatggaaaactgtggatggtgaatatgttgcaataaattgcagaggacagtatgtaataagccatggggctatttaccttattggaagaatatcagagattggaaaacagagcagatttgataataatacagggctttacagggaaattgttcttgaaaatgtatataatgaatatgctaaaacaagaaacgcatcaggttttcttatgcttgttggtgtagataattttaaggaaattaatgaaaaatatggtgcaaaaacaggtgatgaagtattgaatattcttactgattcaataaagaaatatattgacacaccacttagaatattcagaatgcctggtgatgaatgtgccatatttatgccatattccatggaaaatgatattggacaggctaagattctctataagagaataagaaatcgtattgacagagcaattgaaataagaaagtatgatatattttttacaatatcagcaggggttgctgaatttgatacagagaaagacagttttaatgagttgttaaaaaatgccaaatttgctcttcatgctgccaaactcaatggcaagaaccgatgtgaaatatttgttgaaactgagtatacagagtatatagaaaaacttagtgttcaggatgaattacgcagatgtataagtgaaggttttgaaggatttgaattatattttcagccaatatataatactgacaatgacagtttgtcaggagcagaggctcttataagatggaatagcagaaaatatggatttataggtcctaacacattcatacctcttctggaggacagtgcacttattattccacttggaagatggataattaatactgctgctaaggcatgcaacagatggattaccagtattccggattttgtaatgcatattaatctgtcttttgtacagattgtcaaaagtaatatagttaaagatgtattagagaatatcgaaagatacagtgcagctaataatcattatgtatttgaaataacagaaactatagagatggaccagataccagctgttcagaacgtatttaaagaatttgtaaagaatgaattcagattcgcaattgatgattttggaacaggatattcaaattatggatatatgcgtgacagaacatttgatatagttaaagttgacaggtcttttgtaactgatatagataaacttaaagataattatcttatggtaagttttataattaagatggcacatgagatgggattgcatgtgtgtattgagggtgttgaaacaaaggaagaactttcatgtgttaagaaacttggtgcagattatattcagggatactattatggtaaaccggtatgcttacaagattttgaagaacagcacttgaaaagatttgtattaggataagtatagaatggagaattgtagataatgcaggaagttaataacaccagtgcacttgaagaacagctttattatattggagaatgtaagaagttcctggaaaagaaaacaaaagaaataggcagaccgttatatgcgtgtgtacacacatttggctgccagatgaatgccagagattctgagaagcttctcggggtacttaaagagattggatatcttgagacagaggatgaggataagtcagattttgttatatataatacatgtactgtaagagagaatgctaatcttaaggtttatggacgtcttggacatcttaagaatgtcaaaagaaagaatccgcatatgcttattgcaatgtgtggctgtatgatgcaggagcctgatgtggtcgagaagataagagattcttataagtttgttgatattgtttttggtacatttaatatatatgcaatggcaaagcttatatataacagaattacatcaggaagccaggttattgatatctgggaaaagacaaaggatattgttgaggagcttcctacggaaagaaagttcccattcaaatcaggtgttaatattatgtacggctgtaataatttctgtacttactgtatcgtgccttatgtacgaggaagagagataagccgtgagcctaaggatatcattatggagattgaaaggcttgtaaaggatggtgtcaaggaagttatgcttcttggacaaaatgttgattcttatggaaagacacttgacaatcctgtatcatttgcgcagcttctaagagagattgataagatagaggggcttgaaagaatcagattcatgacacctcatcctaaggatattgaggaagagactcttgaagttataagagattccaagaaaatatgtaatcatatacattttccacttcagtcaggaagctcaaggcttcttaagctgatgaacagaaagtatactaaagagcattacttagagcaggttgagatgataagaagaatactgcccgatgtttctattacaactgatattattgttgggtttccaggagagacagaggaagatttcgaggatactattgatgttgtaaagaaagcaaagtttgatagtgcatatacatttatatattcaaaaagaacaggtacgcctgctgccagaatggagaatcaggtgcctgaggatgttgttaaggacagatttaacagactgcttgcaactgtaaatgaagtgtcacatgagcatatcagaagatatgagggcatggatatgaaagtcttggttgagggtaaagatgaccatgaagaaggttttgttacaggcagaatgactaataatattcttgtacatttcgcaggggatgaatcacttatcggacagattgttacagtacatcttgacgaatgtaaaggattttactatatgggcagacttatcgaggattaatcagggagtaatataatggcagagtattcaccaatgatgcagcattatcttgctactaaagcagagtacaaggactgcatacttttttacagacttggagatttctatgaaatgttttttgatgacgctttagttgtctctaaggaactggaacttacattaacaggaaaagactgtggacaggaggaacgtgcgcctatgtgcggcgttccttttcatgcggcagaaacttatattaacaggcttgtttctaatggacacaaggtcgcaatatgcgagcagatggaagaccctaagcaggcaaaaggcattgtcaaaagagaggttataaaggttgtaacaccgggaactaacttaaacagtcaggcacttgatgaaactaagaataattatcttatgagtattgtttatcttggagatgtgcttggtgttgctattgcagattattcaacaggtgacttctttgtaactgagattgagacaggtgcggagcttattgatgaaattaataagtttgttccgtcagagataatacttaatgagtattttgcaatgagcggaatagaccttacatttatatcagagaagctttccatatcagtgtcaacacttgaaaactggtactttgatgatgattcctgcaaggcaaagttaaaagaacattttcatgtaaatatgttggacggacttggaatcaaggattatccggtaggaattgatgctgcgggagcacttcttatatatcttacccagacacagaaaagcgatatgtcgcatattacaagcattgtgccttacacaacaggcaaatacatgcttatagacagttcatcaagacgaaatcttgagcttgttgagactatgcgtgaaaagcagaaaaaaggctcgcttctgtgggtacttgataagacaaagactgcaatgggggcaagagcgttaagaaatcttgtgctgcagccgcttattaacagagacgagattataagaagacaggacgctatagaggagctttctgataatgcaattgacagggaagagattcgtgaatatcttggccctatatatgaccttgagcgaatcatgactaagattagttgtaagtcggctaatccaagggatttaattgcatttaagaattccctggagatgatacctcacattaagaatcagataggacattttaagtgtgatgtattcagacagtgctttgagcagatggacgacttaaaagacttatataatcttgttgacactgcaattatagatgatcctccgattacaatgcgtgatggtggaatgataaaggacggcttttcagcagaggctgatgagcttcgtaatgccaagattaaaggaaaagaatggcttgcagagcttgaaagcagggagaaagaaaagacaggaattaagaatctcaaagttaagtataacaaggtattcggatattacctggaggttactaattcatttaaaaaccttgttcctgctgaatgggtacgaaagcagactcttaccggttctgaaagatacactacagatgagttaaagcatcttgaagatattattcttggcgcagaggataagctgtactcacttgaatatgatttattctgtgaagtcagggagcgcatagcggcagaggttgtaagaatacagaacactgccaaggctgttgcaatgattgatgtgtatgcttcactttctgttgttgcaacacagaataatttcgtaagacctaagattaatgaaaaaggtattatagatattaagaacggcagacaccctgtagttgagaagatgatttctaatgatatgttcattgccaatgatacttatcttgacaatggaatgaacagaatttcaattatcacaggtcctaatatggctggtaaatctacatatatgagacagacggcacttattgtgcttatggcacagacaggctctttcgttccagctgattcagcaaatatatgtattgttgaccgtatatttacacgagtcggagcgtctgatgacttagcttccggtcagtcaactttcatggttgagatgacagaggttgccaatatcttaagaaatgcaactcctaagagccttataattcttgatgaaataggaagaggaacaagcacatttgacggattgagtattgcatgggctgttgttgagtatattgccaatactaaatacttaggagccaagacactttttgcaacacattatcatgaacttactgaattagaaggaactcttgacggagttaataattactgtattgctgtcaaggaaaacggtgatgatattgttttcttaagaaagattgtaaaaggcggtgctgataagagttatggtattcaggttgctaagcttgcaggagtacctgatgtggttcttaacagggctaaggaacttgttgttgacttaagtaatgctgatatatcacagaaagccaaggatattgcgcagtattcaaagaaacttgacaagatgaatgaccagtatagaaaggttaatgatcttgaagttaagcagatgtcgctttttgatactgttaaggatgatgatatagtaactgatataatgaatcttgatataagcaatatgacacctattgatgcactgaatacgctttataagctgcagggaaaagctaagaaccgctggtaaaacagggaggattgtatgtcaataacacttttagaccagaatacgattaataagattgctgcaggagaggtcgtcgaaagaccttcttctgtagttaaagaacttgttgaaaatgctatagatgccggagcaactgcgattacagttgagataaaggaaggtggaatttcatttatcagggttactgataatggaagtggtatcaataaagatgagattgagatagcatttaaaagacatgcaacaagtaaaattaaatcaattgaagatcttatggctgtttcgtctctgggcttcagaggtgaggcgctagcgagtatagctgctgtatcacaggttgaacttattaccaagactgctgacagtctgagtggtgtgcgttatacaattgatggcggagtaccaggtgaagtggcagaaataggcgctccggagggaactacatttattgtaagaaatcttttctataatactcctgttagaagaaagttcttaaagacagcgactaccgagggaggatatattggttcgcttgtggaatatctggcactttcgcatcctgatatttcgttcaggttcataagtaataaccagaataagctgcatacatcgggtaatatgaatcttaaagatataatatataatgtgtatggcagggatataactaataatctgtatgaaatcagcggtaagtcgcaggatattgaggcttctggttttattggcaagcctatggttgtccgcggaaacaggacatatgagaattattatatcaacggcagatatatcaagagcagtattataactaaggctatagaggatgcctataagggctttataatgccacataattatccgttcagtgcgatacattttaagattaatcccgcaattattgatgtaaatgtacatccaaccaagatggaactgcgattctcgaacaatgaatatatatataattttgtatatgatacatgtttaaaagcccttaattcaaaggagcttatagcagaagtttctgtgcctgaccctgttgcagttaaaatgcaggaagcacctgttgtaaaaaacgttatgccggatattaagctgccagagaaaaatgttttggatagtatgccatataagacagaaacaaaaccaacagaatcttcaaaagcagaaactaagccgagaagacttccggagccatttgaaattaagggttctctgcagatggttaaagaagataaagtaagatatgaagctgtgacaaaatctgaaccaccaaagcagatgaacctttttgagaataagctccttgatgagaacagccgtaacaaatacagaatcatagggcagttgtttgatacttactggcttattgaatttgaagataagttctatatgatggatcagcacgcagcgcacgagaaggtgctttatgaaagaacgatgaataagcttcatgataagacaattggaactcagatgattcttccacctattgtactgtcacttaacatgcatgaggaagaaatatacaagactaatcaggatatatttaaaagattagggtatgagattgaagagtttggcggcaatgaatataaggttacaggaattcctgccggacttcctaagatggattacaaacagctccttattgatgttctggatggactttctgaagaaagtgccagcaaagatcctgatattattactgaaaaggttgcaagtatgtcatgtaaagcggctgtaaagggcaataacagactgtcatttaatgaggcatttgaactgatggacgagcttatgaaggcagagaatccatataactgtccacacggcagaccaacacttattatgatgagcagatatgagatagaaaagaaatttaaacgaatagtataggggctgatatgaaaaaagaacctttaataatacttacaggaccgacagcagttggaaaaacagaactttccatagagcttgcaaaggcggtaaatggtgagataataagtgctgattccatgcaggtatacagatatatggacatcgggactgccaagataacaaaagaagagatgctgggggttaagcattatcttgttgatgagattgagccttcagatggctttgatgtggcaagatttaagtctatggcaacaaatgcaatacaaaaaatccgtgagaacggtcatattcctgtagttgttggcggaaccggattttatatacaggcacttttatatgattctacatttgaagatgatgaaagtgactatgaatatagggattatcttcaggggattgctgatactaagggtgcagaggtgcttcatgatatgttaaaggaagctgaccctgaatctgcagagacaattcatgctaataatgtcaaaagagttattcgtgcacttgaattttataagacgacaggcagaaagatatcagagcataataatgagcagagagctaaagagtcgccttataatttttgttactttgttcttaatgataaaagagaaattttatacgacagaataaacaggcgtgttgatataatgtttgacaacggactgcttgatgaggtaaaacatttgtcggacatggggcttgtaaaggacgatgttgccatgcagggaatcggatataaagaggtgttcgattatcttgagggcagatgtgacgaggcaggtcttagagagatgattaagcaggatacaagacattttgcaaaaagacagcttacatggtttagaagagaaccatcagttacatgggtggatttttcccagatacgaagagaagatgcactttcgtatatgcttgaacaactaaaagaaaaggaaattatttaattatgagagaaatgtataaaaatatgggaatctgtgatgaggtgtatgattattgcgacaatataattaagtcgcttcatgacagatttgaagagatagataagaatgcagaatataaccagatgaaggttataaaagcgatgcaggataataaggttgccgaaatgcatttatcaggaacaacaggttatggttataatgatgacggtagagatactcttgagaaaatatattcagatatatttaagacagaggatgcacttgtaagaccacagattatctgcggaactcatgcgttaaatgtagctttatcatctaacttaagaccaggtgatgagcttttatcaccggttgggaagccatatgatacaatggatgagattatcggtataagaccgtctaagggaagccttgcagaatatggaattacatacgcacaggttgacctgctgccagatggtggttttgattatgagggtattaagaatgcaatcaatgaaagaacaaagcttgtaacaatccagcgctccaagggatatgcttcaagacccacactttcagttgaaagaattggcgagcttataagttttatcaaaagtatcaagccagatgttatatgtatggttgataactgctacggtgaatttgttgaaagaattgagccttcagaggttggcgctgatatgatagtcggttcacttataaagaatcctggtggcggacttgctccatgcggcggctatatcgcaggaaagaaagaatgtgttgaacaggcagcttacagattatcttcaccggggcttggaaaagaagtcggtgcaacactcggtgtaaaccagagcttttatcagggacttttcttatcacctgtagttgttgcaggtgcgcttaaaggtgctatatttgctgcaaatgtatacgaaaaggcaggttttgtagtaagacctgatggaagtgagccaagatatgatattattcaggcagttgaacttggaagtgcagacgggcttcttgctttctgtaaaggaattcaggctgcagcacctgttgacagctttgttacaccagaaccatggccgatgccaggatacgattcagacgttataatggctgccggagccttcgttcaaggctcatcaatagagctttctgctgatggtccgttaaaagaaccttattctgtattcttccaggggggacttacatggtatcatgccaaacttggaattatgatgagtgttcagaaaatgtttgaaaaagaccttataaagctttgattgaattaatatttgtgttataatgtattggagtatggatttttccgtactccaatttatggttaaaggatgaaaatctatgagtaatatttctaaatataagaacggctggcttttatggctattcattctgataggcattgtgcttggcggtcttattgcagaacttactgccagtgtgcatgcacttagctggctgtcttatggacagagtttcgggcttgacaatccgctggtattaaatctgggagtacttgtaataacatttgcactccagattaagattactattgccagtataataggagttatactcgcaattattatttacagatttatttaatctgactgctgtttaatttatggtctatgagaatataataacaggtgtggaggaagaaaaactgcttccttacgaaaaatgtcttgagtatggtgcatcatcacttgataatgctgaacttctggcagcgattataagaacaggaaccaatggtttaagttctatccagcttgcagaaaagttactggagaatgccggcaatcttaatggtctttatgttatgtccgtttcagaacttatgcagattaagggtataggaaaggcaaaggctgtccagatatgctgcattcttgaactttcaagaagaattgcaaagcagaaggctagagaaagacttgacttttcgaatgctgaaactattgcagaatattatatggaagatatgagacatctaaagagagaacatctggttcttgtaatgcttgataacagatgccgccttattagagataaggtgatgtctgttggaacttctactggttcaatggtttctgtaagggaaatatttaaggaggcacttgacagcagggcagcttcgatagttatcctgcataatcacccatcaggcaatccatctcctagcagagaggatatgaaggttactaagaatattatggaagccggcagaattattggtgttgaactgttagatcatattgttataggagataattcttatttcagttttaaacaaatgcaatacattaattaacaattaagaaaggaattaagacatgggtaatgcatacggaattgatataggcacaagtaattttaaaatgtgctgcagtgataaggataagatacttaatgaaaagaatattatagctatagctaataaaacagagattttagcttttggagatgaagcatatgaaatgtatgagaaagctccagagcatattgaggtttctttcccggttaagtttggtgtgatagctgatattgagaatatgcagacacttctttttaacttctttaataagattaatgaaggaaagaagattactggatcagatttctatattgctgtaccaacagatgtaacagaagtagagaagagagctttttatgaattagttgttgattcaaaagtaaaggcaaagaatgtttatgtagttgataaacctgttgcagacgctataggtgcaggccttgatgtaactaagtctaagggtattatgattgttaatatcggagcagagacaactgagatttcagttctttctttaggcggaattgttataagcaaggctgttaagattggtggtaataagcttgatgactgtattataagtaatgtaagaaaggcttataatcttgttataggaagtaaaactgctgaaaatttaaagaagcagttaggaagtgcagttcctgtttcagaaacatttgcacctggctttggaaggaatgttttatcaggtcttcctgtaagtgttgatatttcttccgatgttgtatatcaggctataattgattcattacattctattatggatgctattaaggttatacttgaaagaactccgccggaacttgcagctgacataatcaaggatggtgtttattttacaggaggaactgcacagattaacaatcttgaaaagtttatcaaagatgaaactaatcttaatgtcaatattgttgaacatcctgcagagagtgttgtaagaggtcttatgggagttgtatctaatccggaatttgctaaggttgcatatactcctacagagaaaaattttgattaaaaggcaggttttaagatgagaaagaatatttcttcacttatgacttcgaagaatattctcattgcacttacggttttgtgctgcttctttattggtacgagcttttttacagatacgcttaccaagcctcttaaaaagtgcgtttcaatggttgtagttccggtacagaagggtatgaacaatattggattctgggtttatgataaataccagacacttcaggagatatcagttgttcttgatgagaataagaagcttcagagtcaggttgatgatcttacagaagagaataaccagttaaaacaggattcttatgaacttaacagacttcgtgatttatatgagctagaccagcagtatgcaggttattcgaaagttggagccagagttattgaagttactacagataactggcattcgtcattcaagattgacaaaggaactgacgatggtcttaaagttaatatgaatgttattgccagcggagggctggtaggaattatttctgaaacaggaagtaattattctattgttaagacaattacagagaataacagcaatgtaagtggaatgcttatagatactaatgaaacatgtattgttcagggagatgttgaactgatggatacaggcatgatacgcgtatcacattttaaaagtgatgttgttgtcagaaatggcgataaagtagttacttctaatattagtgataggtatctgcaaggaattctgattgggtatattaaggatgttaagctggattctaataatcttacccagtcaggatatattgttcctgctgtgaattttaataatttacaggaggttctggttataacacagcttaaagaataagtgtttaggacaatttattatgaaaagaaagataacagaattaattattatattgtttttctatatcatgcaggtttctgcagcaagagtaatatcaattgctaatatttcaccaaactggcttattattatgcctgtattttttggcttcttctgtggtaagaatgatggaatgtttgcaggattttttgctggaattatgtatgatttgttctattccggtttattcggatttacagcacttatttttatttacataggatatttttcgggatttttttatcagaagtacgaggtaagggaagttcttatccctcttgcacttgtgattacagctgattttggatatggattcatatcatatattggtaattttctgcttcaaaacagacttaatgttggattttttatgtcacgctttatattgccggaggttgtttatacagctcttgtttcattactgatatatcatccgatacattatttttgtgttataacggagcaaggaaaagagagaaagaagaagggtaagattgatgaaggaagtatttgagtacattataagtcttcttaaatccagaatttttcctatgattcttgtatttattgttctgatttctgttcttgttcacagattgtttgttcttcagataataaatggagattcatatgtcgaagacttatcaagttctatacagaaagatatgagtgttgcggctgcaagaggtcgtatatatgaccgtaatggtgtacttcttgcatataatgatttgtcatatgcagtcaagataagcgactctggaagatattcagataatgcaactaagaatgcaacaattaataattctataaacaaaacattacagattatcgaagatcatggagatacatattctaatgattttccaattatttataataacggacaatttacttataatgttgaaggaacgtctcttttaagatttttaagggattcttatggaactgaatcaattgcagcgttaactgatgaacagaaagctacttcagctgagaatatgtttaaacgtctttgtgagacatatagcattaattatgaagaatttggaatagaacattcattaatgatggtaaatcttcgaagatatatggctgccaattcgtataacagatatcttacatttattattgcaaatgaggtatctgatgagacagttgcggcaatattagaaaatagtgatgaccttgtcggtgtcaccgttgaagaacagtatatcagaagatatgttgacagcgtatattgttcacagatacttggctatacaggaactgtatctaacgcagagcttgaagaacttggtgaaggatatgaaagcaatgacattgtaggtaaatctggtattgaaaaaagcatggaaagtgagttatctggtgttaaaggtgaaaagtctgtatatgttgatactgtaggaagaattactgaagtactcgatgaggaagcaccacaggcaggacatgatgtatatcttactattgatattaatcttcagaaggcaatatatcatgcaatagaagatgaagtaactaatatttttatgcagtactttacgcctggaagcaataaaataacttataatagttcaggtgatgttgatactatatatataactgctcaggaagcttattttgcacttatagataataatcttgtttctttaaaagggattcaggaacagaatacatctaatgaagctgatatatacagccagtttgaagctaagaaagctgaaacactttcatggctgagggaagaacttacatctggtaatacagcttatggaaagctttcagaagaacaaaagctgtatatatggtatatatatgatcttttaagaagtgagaatatattcagtcttgctaatgttgatacaagtgacagtgtttattatgactggatatatggcgattcaacgagcctttcgcagcttcttacgtatggaatatcaaagaactggattaatatgtcatctcttacatctgaaaagtatacaagtcttcaggaatcatatgatgtacttgttgattatgttatatcagcacttgatacagatactgcattttttaagaaaatgtataaatatatgattaatgcaggcagcatatcaggaagacaggtatgtatgttattatatgagcagggtgtacttgatatgaatgcagatgattcgaaatatcagtctctcgcatcgggaagcatgggggcatatgaatttatgtcatatgttatctctaataagattattactgttggacagcttgcacttaagccatgttcaggttctgcggttgtaactaatccggataatggtgatgttctggctcttgtttcttatccaagctatgataataataaattatcaggaacagttgatgcaaagtattacagttcacttgttaatgataatgcaagtcctcttcttaacagagcaacgcagtcttttatagccccaggttctacttataagccatgtacaattattgcaggtattgatagtgggataatttcttcatctacaacatttaactgctctggtgtgtttgataaggttacaccatcccctagatgttggcagaaatggggacatggaagtgagacacctgtaactgccataagagattcatgtaatgtttatatgtataatgttggatacaatcttgcatgtagcaagaatggttcgtataatagcacttatggtactaacatattaaagaagtattctgatatgcttggtctttcaacaaagaccggtatagagatagaagagggtactccgggagcatcttcacagaatgccattgcttcagcaattggacagggtaaccacagatacagcacacttaatcttgcaagatatgtaactactcttgcaacctcaggtacatgctataaccttacacttattgataagattactgattatgatggcaatgttattaaggaaaaccatgctgaggttaataatcaggtggagctgagttctgatatatggaataccattcatacaggaatgaatcttgctgctggaacgtatacagcatttttaccattaaagatgtcaattgcagctaagactggtactgcacaggaaagaacaacagatcctgaccatgctacattaatatcatatgcgccatatgataatccacaatactgtatggcagtgcgtattcagaatggttatgcttcaggtaatgctgtaacactaggttcagagatttacaaaatgctttttaatattaatgattaatattgtttaatgatttactaaagaaataactaatatgagatgagaggtgaatgttttggataattcggtaatgatcaaaggaagtaatagtggaattacagtatttcttgatagtgaaatggcttttgaggatttattagaaagtgtttctgaaaagttcaagagtgcgtcaaagttttttaataatgctaatatggcgatttcttttgatggaagagatttatctgctgaagaggaaaaaagaattctcaatgtgatatcagatgtatctgagcttaatattgtatgtgttcttgatgaaaataacaatatgaaggaaatatatgaagatgctgttaagaaagctattgcaagtgttgatgtatcagagccggttgtacagcctgtaaatgatatggtatctgatcctaaaacagcgtgtatgttttataaaggaacgcttcgctcgggtcaggtatttgaatctgacggaagcgttgtggtattaggagatgtcaatcctggaggcaaggttgttgcaaaaggcagcgttattgtacttggaagtcttaagggcaatatatttgcaggtgtagatggcaatgagaatgcatttgttgttgcacttgagatgagtcctatgcagattaagataggcgaaataattgccagaagctcagatgcaggaaccaagataacaaaaggcagaaataaaactaaagttattgaaccaaagattgcctatgtatatgatcagaatatttatattgaagatttagagcagaatgctttagatgacatatgtttagattaatttgttatatttttaaaaaatagttgatttaagaataaaaatctcgcataattaatatattgcgatttattaagaattattaatggaggtttaatatgagtgaagttatagttgtaacatcaggaaagggcggagtaggtaagactacaaccacagctaatattggtacgggccttgctaaacttggaaagaaggtcgttatgattgacacagatacaggccttagaaatcttgatgttgtattaggactcgaaaaccgtattgtatataatcttgttgatgtcgttgaaggtaactgccgattaaagcaggctatgattgctgacaagagatgtcctaatctgtttcttttaccaacagcacagacaagagataagtcagctgtgacacctgaacagatgattaaggttattgatgaaattaagaatgatcctgaaggatttgactacataattcttgattgtcctgcagggattgagcagggattccagaatgcaattgctggtgcagacagagctttagttgttactacaccagaggtttctgctatcagggacgctgacagaattgtaggactccttgacgctcacggacttcagaatcatgaagatttaattgtaaacagaatcagaatggatatggtaaacagaggcgagatgatgtctattgatgatgttaatgatattttacagcttaatgttattggagctgttccagatgatgaaaatatcgttgtggcaactaataagggacagccacttgtaggagatgattctctcgcaggacaggcatacatgaatatctgccgtagaattaccggtgaggagattccattccttgatcttaatggtaagggaggtttctttaagaagctttcttcactttttaagagtgataagaagaattaatatgtattataataagtcacatatggcttattcagggagggattaaatatgggattacttgatttatttaagaaaaaaggttcaagtgatgtagctaaggacagattaaagcttttgcttgtttctgacagagctaactgttcaccagaggttatggaaatgattaagaatgatattattaaagtcatttcaaagtatatggaaattgatacagatggtcttgatattcagattacatcaacggaatctgatactaacaatggctctgtaccagcaattttcgctaatattccaattaaggatatgagaaacagcgaaaagtaataagggttttattatgttaaaaaaatataaattgcgttcatacaactttatattggtatttattctgattgtaacatcagtatttgctcttgctgtggttaatagtgccaacagtgcatatacagtaaagcagggggcaggtattgcaatatcgtttataataatgattattgtttcatttattgattataattggatattaaagtattactggatatggtatgcaatagttactattatgcttataggtgttcttacagtgtttggacatggttcacatggagctaccagatggtttaagataggaccggtacagttgcagccatctgaatttttaaagctggcacttattttgttagttgcaaaacttgttgcagcaaataaagaaaagcttaattcaattaagtttctcttattaatagcatgtcttacattgtttcctatattactagttgcattacaacctaatctttcaacagcaatacttttgacacttattgtcattgctatgctttattgttcaggagtaagctataagatttttggtattgcaattcttgttgtaataccggttttatcagcatttctgatatatgttgtatcagttgaacacccaatccttatagaggattatcaaagaaaacgaattgttgattttattgaaggtaagtcagaagaagttgatatgaatgatgcaggaacatatcagcaggcatatgctgttcaggctattggttctggtcagctttatggtaaaggtcttaataataatgatacttcttctttaaagaatgccggatatattgcagaagcccagaatgactttatatttgcagtaataggtgaagaattaggctttaccggaagttgtattacaatttttttattgtttctgattgttctggagtgtataatagtagctgtgagagcaagaaattttgaaggaaggctgatatgttgtggtgtagcaatatatattggatttcagacatttattaatataggtgttgtttcatggatacttcctaatactggagttccattacctttctttagttgtggtatcacatctttacttacattattcatagctatgggcattgtactcaatgtaagtctgcaaagaaatgttgaaagagatgatgatatgtttgcagatgatttcagaggatagcttttatacattttaatttatacattagggggaagcttaaatgaacattggtttaatagcacatgattctaagaaaaaattaatgcagaatttctgtatagcatataagggtattcttaataagaatcagctttttgctacaggtacaacagggaggcttattgaagaagttactaatttatcgatacataagtttcttgccggacatcttggtggtgaccagcagttatgtgcacagattgaacataaccagatagatcttgttatttttcttagagaggcagagaatcctttagcacatgaaccggattctgataatatatgcaaactttgcgatatgtataatattccattggccactaatcttgcaacagcggaattgcttgttaaatctcttgagagaggcgatatggaatggcgtgaaatttatcagtagaataattaaaataataaaaggtgatattctgccacataatagtggaagagtatcatcttttatttattgtcaatcttttcttaacttgacaatgtttcttgcagaacgcttgttttcttctacaatctctgcataatgcttccgtgtagtattaacatctttatgtcctaaaacatcagcaacaagatatatatcctggctttcctgatatagattagtaccataagtacttcgaagcttatgcggggtaatatgctttacagttgtaacagtctgggcatatttcttaacaagaagttcaacggatcgcacacatagacgcttctttttggctgatatgaatagcgcattctcatgtccttcatcaggcgttaaattctttctttcttcaagataattaagaagtgcttcacggacttcgtcaccaaagtatacaaagctttcagagccaccttttcttataactctgattctgtcattatcaaaatccacatcattaatatctaatccaacacattctgatacacggataccagttccgagcataagtgtaaggagagccagatcacgcgtcttaagcttttcatggctttggagctgtgttttggtaagcttattgccagattccacattatcaagaaattcagctacctcattaggctccattcttataatagctttttcatgaattttaggcatatcaacctttatagtcggattcaaactgattatttcataacggcagtaatattcataaaaacgtcttagagcacataatttacgcttggcagcactttctgagttcgttatatcacgaccgttcttcttatataactttacatgtcgtaagtatctggttatatctgtaccatctattttttctaaatcctgtggtttaaagtctttcattgcatatgaactgaacttaggtatgcattcaatgagaaattcaaagaaacctttaatatccattgcataggcaactttagttcttggctgcttattaaattcaagactatcaaaatactgtgtacagaaatccggtaatatatcaagtaattcattaagctttttcttatacttgatgttttgttgttcggtgtaggttttttcagccattaagaatacctccatatataaaaaatactaatcacttcgttaaacctgactttagcgaagtgattactgcatggataattatattctgcaatctcttattttgcaactaatttcccctgatagagcttcttagtgactatattgatgtgaaatgctttctgatataatttaatcttgttaagttcattatcagttataattgatatacacgttcctgtattcccattacgtccacagcgtccacatctgtgaatatattccttattgtcctcaggaaggtttacattaattactgtatcaatattatcaatctgaagtcctctggctgctatatctgttgcaataaggagctgaatctttccacttctgaaattctctattgcagctttcttggctgaattatctttattaccggcaattgaagctacattgtaatgatgatattcaagcttctgaagggattcttccagatcatacttggaattaacaaatataattgctttctctggtttaacagctttaataatctttcttaaagtttcaattcgttcccttctgtcagaaataacgcttatatgcttgattgtagaaggaatctgacttgtattaccagaattactgttaatatcaatgaatattggtttgaaacacaaagtattggttcttgtcttcttatctacgcttgcagagaataaaagaacctgtgtaaacttcattaaagactttcttatcgcttctacatcctggataaatgtcttatcaaagagcttgtctgcctcatcaagaacaagagtcttaacctcatgtactttaatcttcttgttacttataagctgatgtatgcggttaggtgttccgatgattattgcaggcttattagatttaatagaatcaatctgtcttgatatattcacatctcctattaatgcaacagatgaaaatgtattatccatatgtgcaaagatatctttaagcgtattattgacctgtattgcaagctctgcagttggaacaagaataacagcctgaatattatgagtattactctttaatctgttaataattggaataagatatgcaagtgtcttacctgttccggttgatgaacaagctataatatcgcggttgtccattatatgcttatacgtctgacgctgtatttcggtcatatcgacgattttattatctgaaagataatctgatacgccctgagagatagtctctatatcgctaaatttcatagttaatctccttataaataaattattaaatattaagttatatctacagccatttcgctatcaataaattttaacaaaaatgcagtgaaaagtccaatattaagtagcttttcactgcatgcgggaaatgtatatgcaattagatattatcttatctcagttgaataataatatattacaagattcttacctgaatggattgtgtcagatgataaatcattcatctgcattatattgttaatatatgaagctgtatcttcatccccattattatatctgtcagcaagtgaccataatgtatcattatcttctacagatactgttgtgtaatacttatatgttcgtgttctgttcgagtcatcagaagccttgacaataatgcctccaatagaaacggcaaatataagaattgaacatataataaccattcttaatgacttgacagtcatctgtctgtttcttctgcgtctgtcgcttcttttcttagctgttgctcttctatatgtgtattctgaattattcatacgtaaaacctccaatcaaacaagtgttctgttgttatgagttgattatataatcagaacatgcgtttgtcaataaaaatcgaacaaattttccgaacattttttcagaaattatgtttgcacataatgtataaatgtggtaaaattatttaaaagaatttaatggaggttcgtaatatggcatatggcagaataactcagaaacagtctgagattcttgaatatattaaatcacagattcttaacaaaggatatccaccatcagtaagggatatatgtcaggcagttaatcttaagtctacatcatctgttcatgcacatcttgagtctttggagaagaatggatatataagaagagacccgactaagtcgcgtacaatagagataattgatgataactttaatctttcaaggagagaggttgttaatatcccgttattaggtcaggttgccgcaggacagccacttcttgccgttgagaatataacagagtactttcctattccatctgaatacatgccaggtggagaagtattcatgttaaaggtcaagggtgacagcatgattaatatgggaatctacgaaggcgatcagataatagtaagaaagcagaatacagcttctaatggagaagtaattgttgcactagtagatgattcagcaacagtcaagcgtttttacaaggagaacggacacataagactccagccagagaacgatttcatggacccaatcatcgtagatgactgcgagatattaggaaaagtaataggtctcatcagactaggcatagattaattttaatccctatgaaaatccagccatagatatataagaaattcgataaccagccttgagagcttggtgagctgccaaagcagcaaaacaagctctcaaggcgtccggatttaaatatatctatagctggatatatttttatattatcaccaattaacaacctgtaatacattgcagtgcagcctcccgtgagaatacgaagccggaggtatatagataatcagaaccgtttgaggacgccggcacttggtaagctgctgcaggcagcgaacctagtaccgctgcgtccgagaccgagcgaaagcgggttctgattatctatatacctccggcagagttccctcccgggaagccacctaagcagcaattacaggctgttaatatcaacctctttaccatcacgccatatacgttcaatattatagaacgctctgtcatcctcagagaatacatgaacaataacatccttgtaatcaagaagaatccatgaagctgtattataaccctcaaccttaggatcatcgaagccagccttgaacatttcttcttctacattatctaccatagcctgaatctggttagtattgctaccactagcaataacgaaataatctgcaataacagatacattgctgatatcaataactctgatatcttcagccttcttatcctgtaaggcatctatgataacctttaacatatccttagaatctgccatatcttaattctctctttctttaataatccctttgtagtattcgtaggtatcaacggtctgtgtatcaatattacgaccagtttttcttatatacgaaagggtgtcgtctaatattatataagccaccatatcaatatcagtgaatgccatatgtcttatgtcatcaagattggcagctttatttctgtagggttcaatataatctgcaatgaatacaatcttttctaataaagtcattgcaggctttcctgttgtatgccactggatggcagaacatatttcatcatcttcaacattgtacttgtgtgctgcataatatgcaccaagctttgaatgaagcagataaggactttcaaactcaatatctgatattggaagtccaaattgttcacattcagcaatctttacatcatcaggaacacatttggcacaatcatgaagaagacctgcaatatacgctttgttcatatctgcaccatgacacatggcaagacaggcacttgtattagcaacaccaagtgtatgctggtatcgcatgttgtctgtacggagtgcgtcttttacctgtgttcttaattgttcaatatatttgttatccataataaaacctcttaaacataaagttttctggactttatatactcttctacttcttcgccgacatcttcttttactgacagacccattgcaaccttctttcgtatatcagttgaactgtaaggaagttccggaacatcaataaaatcaataaccgcaccatatttatcagcaagaaaatgtttctgatctataagtacactggctgaattattgtctctgttagcacataaaagatgacaatggctgcatatatactcaggatgataccagtcctgaatataaagaagcgaatctgcacctattataaaatatattttcttatatgaatcatatatctgtgcaagtgtatcggctgtgtaggtattaccgggacggtcagtttcaatcgtagaaagtgacatgtaatcaaaaggtttaattgcaagctttaccatattacaacggtcagttgcacttacaatgggagaattatctttataagcaggtgtgcctgaaggcatgaataatatttcatctatatcagactgctcgtaggcacatctggcaatacctgtgtgtcctttgtggattggattaaatgtcccacccataatacctattattttgtctgaattaatcatggtaaaatgatttttttgttgtccttagattccttgtaaagaacgattttctttccaataacctgaacaacctgtgagcgtgttctttctgcaaccatctgtgcgatttctctagggtcatcggcacagttattaagaacacttattttgataagttctcttgcctcaagagcttctgcaatagctgcagtgttctcaggagtaagactgttctttccaaactggaatattggatccattgtcattgcaagaccctttaaataagctctctgtttgcttgtcatatattctctcctattaattatgctttatagtaatcaaactcaaggtaatcaccaacgataactgtatcgccttcctcaattccaagcttctcaagttcatcaagaacacccgagcgcttcatgaatttctggaagaaatcaaatcccttttcagattcaaggttagtataaccaagcattttatcaatctttggtccgttgacaacgtatacgccatcttcgttaatagaaacttcaaagctttcgttaggattatccataagctcgtcgtagtcaaattctttttcaaataatacaggttcgtccttgaagttatcaagcagtgttctgactgcgtataacagctctttaacgccctgtcctgtaacagctgatataggatataccttaataccttccggctcaaatgcatctcttatagcctgtacagggtcactgccatcatcatatataacatcaatcttattagctgctataacctgtggtctttcaagaagcttaggattataattctcaagctctttgttaatagccttaatatcagctataggatcacggccttcagttgaagctgcatcaacaatatgaataatgactttagttctctcaatatgacgtaagaactggtgtccaagaccaacaccttctgatgcaccctcaataagaccaggaatatcagcaataacgaaacctttaccaccatcaagatcaacaacaccaaggttaggattaagtgttgtgaaatgataattggcaatcttaggtcttgcattagttactcttgataaaaatgttgatttaccaacattagggaatcctacaagaccaacatcagcaataaccttaagttcaagacgaacccataattcctgcgcatcctgtccaggctgtgcatactgtggagcctgcatggtagatgtagcatagttcatgttacctttaccaccacggccacctttaagaatagtttcctgaaggttatctccagacatatctgcaataactttaccggattcatcatcatatataacagttccttcaggcactttaattataaggtcttcaccatctttacctgtgcatcttctcttgccgccttcttcgccgctttcagcaatatatttgctgttatgtctgaaatcaccgagtgtattaagccctttatcgaccataaaaataatatctccgccatgaccgccattgccgccatcaggaccgccagcaggaacataaagctctctacggaagcttacatgaccatctccacccttgccggatttaataaaaatgcggactctgtctgcaaacataacctttcctccattctatatttaaattatgttaactgtttagaattaacatttacaaattaagaaaaaagctccaaatccgaagacttggagctaaaaaacaaattagtcgtttgaaacaacaggataaacagaaacctgctttctatccttgccctttctttcgaacttaacagttccatcaacaagtgcgaataatgtatcatcgccaccacgaccaacattaacacctggatgaatctttgttccacgctgtctgtaaagaatattaccagctaaaacaaactgtccgtcagctctcttagcgcctaatctcttagactctgaatctctaccattctttgtagaacctacaccctttttatgagcgaataactgaagattcatatttaacataaggttacacctccttaacactaattgataagtatttcggattatcctcagccacagaactaacacctaattcatatgacttaagtaaaatcgaagtttccggactaacaggcatagccatcttaaagataacaattccttcatcctcattaactgacacatcaaacttatcatcggtaaaagcctctatcgaattaatagtgttgattgtcagaactgaaatagcagaacatataatatcactgccggattcagcatatcctgcatgacctgcagaataaaaacctgtgatctctttttcagagttcttaaaaaaagttatatgagtcatgaataacacacctcacaaacatccatacaaaaattaagcattaatcttttcaatcttaacttctgtgtaagcctgtctatgaccattcttcttgtgatatccagtctttctcttgtacttgtaaacgataaccttcttatctctgccttcgcctacaacgctagctgtaactgtagcaccggcaactgttggctcaccaaccttagcctcgccgttgtttacaaaaagaacctgatcaaatgtaacagtgtcaccagcattaactgcaagcttctcaactctgatagtatcgccttcagaaactgtgtactgcttaccacctgttgctataattgcgtacatatggtatcctccttaattaaatactcgccagttttggggaatccgacatacatcagatacacttataccctaactgagcggcacacaaaatatataatatacattcagttactatttgtcaaatgttttttagaaaaagagataaaatcaatatatcccttttccccaatttttacaacggcattgtagggctttttctctttgtttttgattccttttaccagggtttcttttccctccagtaattcttttacattcgttttggttagttttttctt

SEQ ID NO: 8501 - DNA, 133461 bp, Unknown
  gut microbiota DNA sequence
ggttcgtgtatctttcgatactcgcaagattcattaatgaatcattttaaaattctcaaagaatttcaaggttgtctttctattcaattatcaaagatctgtgtcgctcaaacccagtatttatctggtgttttaagtcttatttgttaccgcttaccgcggcgacttgtatataatatcatcaggcacacacattgtcaacaacttttttcaaaaaatttcaaaaaagttcaatttttttcaatcattgacttttaagcgagactgacatgcctgcgaagccgcttgtttgctgactttctgcacatttacattgtaatcagaaatcaaagacctactgttatattcctgtatgcatttttagtaggtgataattcttgctggttgagatattttcagaataaaagcacacgcaaacatccaatacagcttattgcgtaggtcaatcacaagcaatgtgtcgttttattctatgaaattggaagaaaaagacctaccaaagtacaatacctagatactttagtaggtctctgctctgaaaccatagcaatattataagaaaaccacccactaattatgttatccaatagcttctagtaggcattcgccccataacacagcaccttaacacatccctataacacattcccgtaacacatcttctcattgcaatctgccataacgcattaacacattttctcaatcactcaaatattgacatagtaacaacatcaatatactttcgaagccacttatttactgtcttttttcattatacccattaaataaaggaggtcttatgcgacctccctgattattcctatgcttttaatgcattcttagcttcatctgttatctctctctgataagctatctcattttcaatatttcttgcaacctcattagcagtatatgctgcatctattactttcttaagcacatttccaacatcatctgctttttccttctgccttgatgaattatcataaatattcttcatagctgtgaccgtttcatcaaccgaggtctgtactttagtaattgtgtctgttatctctttggacgacttagctgactgagcagcaagatttcttacctcactggcaacaacagcaaatcccctgccatgttcaccggctcttgcggcttctattgatgcattaagtgaaagtatattagttctgttagatattgaactaataacagctgcaaattcttcaatcttcttagacaaagcttcaagttctttaatcttagctgaagactcctccacaactttattcattgattctatcattccaagaatctcttctacacttgacatgctttccttaaccagattaagagatgtatctgacgaattaataacatcaaatgcatctttttcaagcttttcctgtgaatcatcaagtccattaagaatattggtgagattattcaccattgcttcgttactcataagtaatcccccatcctgtgtattttatatcagtttaattgcttcctgaacattattaacaccaattatttcaattttatcattcttctttatgtttttcaagcatacacccggcaatatacatgttttaaaaccaagcttaacagcttcattaactctctgttgtgcctggcttacagctctcacctcacctgcaagtccaacttcaccaaatataactgtcttttcgtctattgccctgttcttaaagctgctcacaagggccatcacaattcccaaatcaagcgctggctcacttactttaattccacctgcaacattcacataagcatcactgcctgacatatgtatacctgctctcttttcaagaacagccataagaagattaaccctgttatagtcagtacctgcagcagtccttcttgccattccaaaattagaatcgcacaccagtgcctgaatctctaccattatagggcgtgttccttccaaaaggcacacaacaactgaacccgatgcattctctggtcttccattaagcatatattctgatggattctcaacttccgacaggccgctctgctgcatttcaaatacaccaatttcattagttgagccaaatctgttttttacgcctcttaatatcctgtatgaagcatatctgtcgccttcaaagtaaagcaccgtatcaaccatatgctcaagcattcttggtccggcaactgttccttccttggtaacatgtcctacaatgaatatagtaatgttcagtcccttcgcaagctgcataagtattgatgttgtctctcttacctgagaaacacttccaggtgctgctgccacatcttctttatacatagtctgtatcgaatcaattatcacaatctcaggcttatttcttgtaagaatatcttctatgctatctaagcttgtctcacataataacttaagtgttccactgcattggccaattctgtctgcccttagctttatctgcttaagcgattcttcaccagatatataaagtacatcttttcctgctgctgacaggttgtaacacatctgaagcagaagtgttgactttcctattccaggatctcctcctacaagcactaaagaacccgaaacaattcctccaccaagcactctgtcaagctcagctatacctgtggatgttctgtcattttcttcaaagcttacactatttatctctacaggaacaggtgctgatgatgccgctgccctctggcttgtgcctgctattcctttggctgacttaggtttacttactggttcttctacaaatgtgttccattccttacatgccggacactgcccgaaccatttagcagactcatatccacattctttacaaaaaaaagctgtattctttgcctttgccatatatccccctaaaaaaggctgccacaacatataaatgtgtagcagccctgtaaaatcaaaatacttttaattataatcaagccttcttaatatccactttaacaggcttctcaccatcaaattcaactgaaagaacaagcttaccacccatattagtagccattgttcctgcatctttatcgttaattctgatatcatatgatgtaccttcttcaaggcctaatgtaatctgtgcatcctcatcaccttctaccataaatgatacacttgtatctgttgccttaaaatcattaactgctgtacccggaacagattcatatacaaaagagccgttcttctccagctttgtgatttcgttaaatgtcttaaccttgtatgtatctccacaatgttcgaaatctggcagctttgacttggtatccaacttataattaccaaaactaattgctccatccgcttctgaacgaatcaattcatttactactggcatattattatcctcctatatgttacgatatgtatgtactgattatacaataaactgacaaaaagcgccagcaatttgtcagttgtttattgtttatttattaatttatttgttcattcctctcttgagggtaaagttcagtttattttcctttacagttatctttactttattgccagcgtgaacttttcccataagaatccgctctgcaagaacatcttcaacctcattctggattgtacggcgtaatggtcttgcaccatatttagaatcataacccttatcaacaagccactgtctagctgcatcatcaagctctattgataatttcatctgttccataatacgcttattgacattggcaatcattatatcgacaatctgtgctatctgctcttttccaagaacatggaatacaactatatcatctattcggttaatgaattctggcttgaatattctcttaacctcgtccataaccttgcccttcatctcctcatgattctgctgctcagtcattcctgacgagaatcccagtgatttaggtgatacaatattttcagctccagcattgctagtcattataattatagtattcttgaaatctataaccctgcctgttgaatcagtgatatgcccgtcgtcaagcacctgtaaaagtacattaaatacatccgggtgggctttctcaacttcatcaaaaagaattacagagtatggatttcttcttactttctcactaagctgtcctccctcatcatatcctacatatcctggaggtgaacctataagctttgacactgtatgcttctccataaattctgacatatctactcttataagagaattctctgtaccaaacattgcatctgccagtgcctttgaaagttctgtttttccaacacctgtaggtcctaagaaaaggaatgagccaattggtctgtcaggatctttaagtcccactcttcctcttcgtattgccttagcaacagctgcaacagcctcgtcctgtcctataaccctgttgtgtaaagtttcttccagtttcataagacgctcagactctgcctgtgcaattctctgtacaggaatctttgtccatgtcgatacaacagaagcaatctcatcttcatcgacaataagattattcttattgatactatcctgccactgctttgtcatcttttcaagctgttcttttttctttaactgtttcttcttaatttcaccagcctgctcataagcttctgactttattgcttcttccttatccttggtaagctgttctatctgtgcctctaatgtcttaatctcatcaggcattacatatgcatcaagccttgtcttagaagatgcttcatcaataagatcaatagccttatcaggaaggaatctgtcattgatatatctcttagataacttaacagctgcaactactgcctcatctgtaattgtaacatgatgatgctcttcatacctgcccttaaggcctcttaatatctgaattgcctcttctgccgtaggttcttcaaccttaacaggctggaatcttctctcaagagcagcatccttctcaatatgttttctatactcctcaagagttgtagcaccaataagctggatttctcctcttgcaagagatggttttaatatattagatgcatctattgctccctctgctcctccagcacctattattgtgtgaatctcatccagaaaaagtaatacatttccagcatttttaacctctgctattaccttcttgattctttcctcaaattcacccctgtacttagaaccggcaaccatacccgacaaatctaatgtcagaagacgcttgtccttaattgtctcaggcacatttccttcaactattctggctgcaagtccttctgctatggcagtcttaccaactcccggttcacctataaggcaaggattattcttagttcttctgctcaatatctgaataaccctctgaatctcttcttccctgccaataacagggtccaatctgccttctcttgccatctgtgtaagatccctgctgtactggtcgagagttgctgtgctttttttatcatttcctctaggtcttccattctggaaatcttctttaaccctgccggcatcttctcccatagccataagaagatcaacatacatcttcttgacaggaacccctatagtattaagaagccttgaagctacgctgtctgtttcttttattattgctattaaaatgtgttctgttcctataagctctgacttaaatcttgccgcctctcttgctgcattatcgagtatatgtctaacccttggagtatatcctgatggttctttgacattaactacactatctggtgctataagctggcacacaagattaattatcttctcatccgtaatatcattgctaagaagaactgaagatgcaagtccgccctccgctttgataagtcctataagaagatgctctgaacctatataaccatgacctaacatagccgctgtatctgccgcataattaagtgcctcctgcgctttgctggtaaatctgctctgcatatctataaccctttctatgattaatttcgtaaatatctgttaatgtattgttggaagatgttctcttataaaatcagctcgtgacacttccagttcctcttcattcatatccttgttagaaatcataagaagatttgccggatgaattccaatcataagctgatatatattactctcatcaaatccgtcagccttaataagccctgatgcaagtccgaatcttatctgggaaagcagcagttctccatcattaagtgtaacctttctggcatattttaacacaccatatgacctgtacaccatatcaagtgctgtcatttttctttttgtaatatactgcttcctgtaatttctttcctgtgcaataatctgttctgctatattatccagattgtcaattatatctttctcactctttccaagtgttaccagattagtaagctggtatatatcacctaaagctctgttattgtcgccctccattgcttttagcacaagtccgaatcttccaacctcaggaatcagccctgatattttatcatttcctgcaagtgctggcaaatgtagcatataacttgctctcattcctgtacctgcattagatggaagggttgtaagatagccaaacttctgatcatacgaatagtcaagtacatctccgataacatcatccatcttatcagccagtgtatacgctttctgcatattcattccggcagcaaatgcctgtattcttatatgatcctcttcattaatcattattgacacatcttcatcaggtgcaacaaatcctgctgcgtaatcctgcttttcaagatacggacttataacatgtctctccctcatgcccatcttctgataagcatcaagatagtcaaaattatatgaattataaccgcttattggcgatattgtctttaactggtcagtaacatttttaaccagctttttagcatctgtgtctgacatcttataagaaaaattatatccattaatattacgggcaagccttactctgcttgatataacaacatcagagttattgccgccctcttcaaaccatctaagcatcgtgaccgcctccctgtgttgaatcatccgtattatccattttctttaactggtgaatcatgtcccttaatctggctgcctcttcataattctctatctcaacagcctctcttaactttatccccagtttcctgatacggctttcataatcatcattttcatcctgcatgactggcagagtatctgtctcattattttcatcagacagccctgagtatttcttatatatctttcccctatgaactgaatctccatgcagtcttttcatattatcctcaataagaggtccgaataccccatagcactcagcacaaccaaatttaccaaccatagtaaattcatcaaatgtcattccacagcctgggcatctgatatgcatcataggtccgtcttccacctgggctgaattaccagccagcagccccgtcagaagccttacaaatggaaactccgcatctgaactgtctgacattcctgcaaaattaagccttcttgcacaatccatgcatatatggtgttccttcttaactccgttaattatttctgtataatgaattgaagcttcattctgatgacaattctcacaaagcatattattcctttccagtcaggaatcacattcctgctttattcaaatactctcatcttagttaaagcatagtaaggaccaaaatatgttattaatgcaaccataaaggctattaccagtgccagaacattagatgatgtaagtgtatacattcccttatatgaaagccatgtgaacacgcccattataagtgccgatatacctggttttgcaaatacacttatatacggcatcgtataatcaatctcctgatataaggttcttagattaagtataaatattaatattggaaatgttgcattacctataaccactgcatatattcccagagccgagaacttaagaagcacgaataccagcacaatatgaacagcaagtgatatagatgaatgaatcattggtacatttacacggtcaattccctgcagtgctgtacttgtaactgtagagagtgtatagaatactaccgcaatcgcacctatttttaacatcattccaccctgagcgctgttatagcgggaaaataacagctttattataggctgacctataacaaacagtcctacaaatgatggaacagcaataaacatgttagtctttaatgtcttagtaatcttatcatatatagaatcataatccttgtctgtaaatgatgcaacaacgctaggcagcatcgaagcagacattgcagatgcaaccccctgtggaattcctataagcaggctgtagcttgaactgaaattaccaagatccatagatatgctcttagtaatatctcttccaaccattatattactaaacattacatcgtctatcaaagcacttatctgataaaatgtctgtccaagtataattggtatcattgtatatatgattatcttacaaatctgccctgtgctctggttctctgtatgtctgtcttttcttttcagtctgttaaatgtcggtgtatataccgcatacaaaaatcccatgaataaaacagccgtaagtgctcccatcgcagtaccaagcgtacttcctgccgctccatatgcagccacatcaggtgatgaggcaaatgctttcatcattccatatcctgctgcaatactaacaatcgcattaacaatctgttcaagtatctgcgataccgcagttggaatcattgtactctgtccctgaaagaatcctcttataaccccaagaattgcaacaaggaatattgtcggtgcaagaatccttaatggaaccgcaagtcccggaagtcctcctccatatataacattctctataaatgaagcgccaaaaaatacaagaagtgctgcgatacctcctgtacacactgcaaccattaaagaacatcttaatactttagcagcacttttatatcttttctttgtaaatcttgctgacacaagctttgatacagccattggcagtccgtacgaagacaacacaagcattatattatatatgttgaaagcagctccatatataccattgccttcacttcctataatgttaactacaggaattctgtaaatcatgcctattatcctgacaagaatacctgcaattgcaagaatacttccatgaactataaaattacgtttattagactccgacatattcatctccaaatcttatgtaataattgttttcgaattagattttacatcttatatacaataaaatccataaattttttgttaaaaaagccgttccaaccacacacgattagaacggcttatatttttatattaattaattaagaaatcagccagcatccatgtaccattctgttttacaaatgtatatgtaagcgatgttttatatgttgtattacctgtcttgtaatcaacataaaggtcataataaacatcacatgagaaacatttgtctgaatactttctgaaattagtaatagattcattgttgaactgataagtatatgacttaccccagaggtacgcccatatggcaggaatatcactgacatactcagctgcagtaccaaccatatagcttgaaagcttagaaagacttcccctgttgataatataagctccatactgttccgctattgtatatatccttgattccatacttttatacaattcatcatccgatggatagtaaattgtatatcctgtcttcttgtcataatcaactgtcagatctttaccattaagctttgctgttatatcaggctttgctataagctgtcctacatcatacacatcattagttggtaccgtaacataatctgatacatgcagacaaggtgcaaacttaacttctgactctgtcttgtatgtatcagtaacctgtactccattaatataaacatctgcacctgttggagctgttattttaacttctgcaaggtcctttgtaaaatctccaaaagaaatagttccaagagtccatttattaaatttatgtgcattctttcctgccgattcaagttcaacctttgctatcggcgtatcacctgcatatactacatacacaggagttttttcagaatattcaccagcctttttcttatatgatactgtaccgtcatttaacttatctgtaaaatatgatgctatcgtatcattcgtttcaaactcatttactttcacgtcattatctgataaaagctttccaatcccatcaggagtaaactgattcacaatcttatccattgttcctgatggcattccctcttcataatcttttaaaagactatgaagcataattaatgtaatcacacctgccagaagaagaatcccgcagtatatacataagaattttttaaaaattgaaagcttcttttttcttttattatttcgtggcatactacttttctcctccttacttaattaaaaatgctgtcggacagcttcttggacctgttggtgaatatggtacatttattacttcaccatcataatacatctgtgttgatgttccaccatccattgtagatgcatttacagctccatactgtgccataatatcctgtaggtctgaaaatgtagcacctatactgttaggctgtcttccatctactgcaagaagaagaatctttccatctgctgtctgtcctatggcagttcttggattagttccccctgcaataccaacaatatcctgagcctctccattaacaataagaaatggaccaatatgattgcttatgcttacgcagtctcttatattaagttcctttgcctttgcagcattcatattaccaagaacaagcttattatcaaatgtaattccggtaacatgagatgttccgccattatcattaagaatctctccgtctttcattacaagaccaatcggcattgctgtataagttgtttctccatcaacaaattctccgccattaactcctccgattgcatcatatctctttgcaatatctgcaacaaccattccatttccattggtaaattcaggaactgttcccacaaataatctgcttggatcttttacaatcatgagttttccagaatatgtagcaccctttacatctacaatctcaatatcaggagtttctggatcctgggctgctgtatcaatatttacaagtcccgcatctgttatctcatctgtatctttaattgcgttattggccttaatctggtctatctcatcctgagagcagaaccagttagcaagaaatcctattgcacttgtctcctgtacagaaagtacaaactgaatctttgctgtcttagacggtccatacacaagcattgccataacagcatacagaaatatcaccagaataagaatagttgacaaaagtgtcgcaccgactcttcctgcccatacaagaactggattcttctttttatttttatttcttttattagatgcgttgccacctcgtggcttatcgttaccatacgactttttatcttcatagctgtcatctaaaacgtcaaatggatcaaaatcatcaatatcttcaagttcaaaatcatcaacgatatctatatcgtcaatattattctttctttttgccactataacttcctcctaaaccgttacttaaaaacccatcttttctgaatctgataacttacaaagaacaatgcaagatcaattattatcttggcaattcctgaaagcacaatgcttaatgccagcagctttgtagcaatatacaccaaagcataagaacaagcaagctgacagaaccataaaatgtaatatcttaccaccgtctgtttaagaccggactgtgatttaaatactgcatttctgttaagcgagaaattaaaaactgatgaaagcactcttgccgctgctgtacttatgaatattcttaagctgactgtaagccctataagcacaaattcaagcacattaaatattatattatctatagcccacgaagcaatagagcttcctacatatttcatgcctgtgcttttaaataaatatttaaatatcactttgtatatcttaattgaatctttgacaggattaaaatgtgatgatgaattatcttctatgtacacagtttctatcgattcttcctgaaatccaatattatactttttgaaagcaagcagcatattagtctcatactcaaatcgctcgccttctaccttgtcaaatgtctcaaggtacttgtaaggtattgctcttaagccggtctgtgtgtccgaaatattcaatctgcaaagcaccttaaatactccactagtcatattattgccaaatttacttcttgccggtacatcatcaccagtaaaatcccttacgcctaaaacgacattgcctgtactgaccatagtttcactgcatttcttaatatctttggcacgatgctgattatcaccatctactgtcacaactccatcaatatcttttctattctcaaggcagaattcaaatgcagtcttcaagcctcttccttttcccttgttaacttcatgtgtaagaattgtacattcactatgtgctgctacttcattaaaaggagccatatgttcctcatcacttccatcattaacaataatgatgtccttaaagccttcttcaagtaaagcatcaactacagctacaagcttattatcaggattcagtgaaggtataataaccgatactttcataatattcatcccactctttgctaatatttatagtgcttttccatttaaacgcactgtatttagaatataataatttcctaaagattgcaataaaattttcatatactgtgtaacagggtcatgctgtaagccataatattgtattgtagattaattttggaggacttttacatgagtgatttagcagcaacaaactgcggaggatgcggcggatgtggagataactgcaattctattgtatggattatcattctccttctcctctttgacggaaataacggatgtggatgcaacaatggttgtggaaatggttgcaattccttctggattataattctcctcttcttatgctgtggctgtggcaatggaactaacttcctcaatggctttggttgcggatgcaacagcggatgtggatgcaacagtggatgcggatgccagtaattatttaatatggggctgccttaaacggcagcccttatatattaattattattatgttccatcatacattttccatctatttcatatatggtattctcttcttcaacaagtatattgccattgtcctgaacatccatattaattaccatatcataattccttttttatatattatatggacttatttattaattgctaagacttacaggcataattaagacatataacctaatatatatagaataaaatattccgccgagagttcacatgaaagaacttcccataacagaatttgatatgcagacactgccacaattcatacagcttgccaaagcaattcttccttttatggaatttaatacccagcagacacttagtcctctgctccgtgcatatgaattttcatgtacaatgaactattacagccgccctgaaagccttcgtattgcggcatgttctgcaaagccccacctttcgttaaacagtccaatacaggatatactttcagatgaaaatatcatgaatgttattcttacttactgtcccgacaatctccggaatattctgagtaattttaaaaactataacaaaatgtccgatttattcaatattttaaatcgtgaccagagtggcagtaatagttttcttaatcctgcccagcaaaaaatgtatgatgcttatacagaacagttgaataatctcaatctttaatatttggaggattttatgtcagaattagattttagaaaacagcttcttctcaatgaattcaagactttatcccagggaaagaaaaatgatgaaatcatccctcttctgtttgctatcaatgataaagctaaaaaatccggtataaccttcacaaaagaagattgtcaattagtcatcaacagtatgtctgggcagctgagcgaaaaagagctcaggcttctgcctgagcttctctctcttcttaatatgaattaatgttttattattcttaattactttgcaacaatattaacaattcttcccggtacatatatttctttaataatgttaccagaaagcctgcttccaagtgcttccttagcggcagcaattacactgtccttgtcagcatccttggcgatattgatagtagacttagtctttccattaatctggactgctatctcaaccgttgactcaactgtcttagcttcatcgtattcaggccatgtctgctgatatactcttccgttctcgccgattgcttcccacatctcttctgtaatgtgtggagcaaccggattaagtaagataaggtatgtcttgagttctcccttagtaatcttacctgccttgctgaaatcattgagcatagtcatgagctgtgcaatagctgtattgtatttcagattctcataatcaaatgaaaccttcttaattgtctgatgcatctttgtctcaaattccttagagaaaccttcctcatcagtcattatatcctgaagcttccatactctgtctaaaaatctgcggcagcccttaacgccatcctctgaccatgaagctgctgcgtcaaatgcaccgataaacatctcgtatgttcttaatgtatctgcaccataatctcttacgatatcatcaggattaacaacattgcctcttgacttactcatcttctcgccgttctcaccaagaatcataccgtgggatgttctcttctgatatggctctgggcaaggtacaaccttctggtcgtaaaggaatctgtgccagaatcttgaatagagtaagtgtaatgttgtatgctccattcctccgttataccagtctaccggaagccagtacttaagtgcttcctgacttgcgagtgtctctgtgttatgtggatctgtatatcttaagaaataccatgatgatccagcccactgaggcattgtatcagtctctctcttagctggtccgccacagcatgggcatgttgtattaacccagtctgtcatggctgcaagaggtgattctccattatctgtaggcatataactttctacctctggaagaagtaaaggaagttcgctctcatcaactggaacatagccacatttgtcacaatgaacaattggaataggctcgccccagtatctctgacgagagaatacccagtcacggagcttataattaacctttgcattaccaattcccttttctgtaaggaattcaatcatcttttccttagcttctttaacttcaagtccgttaatgaaatccgaattaataagaacacctgttgctacatctgtaaatgctgcctcattaacatcaacttcttcaccgttctttgctacaacctgaatgataggaaggttaaatttcttggcaaactcccagtctctttcatcgtgagcaggaacagccatgatagcacctgtaccatagctcataagtacataatctgatacccagattggaacttccttgccattaaccggattaactgccttaagtccgtcaatctctacgcctgtcttatcctttgcaagctctgctctctcgaaatctgactttcttgaagcctgctctctatagctttctatctcatcccagttcttaatctcgtccttatacttatcaagatatggatgctctggtgatacaaccatataagtaacaccaaaaagtgtatcacatcttgttgtatatattcttaacttatcttccttaccagcaattgcaaaatcaacctcagcacctgttgagcgtccaatccagttcctctgctgtgtcttaactctctcaatataatctacatggtcaagtccttctataagcttatctgcataatcagtaatcttaagcatccactcactcttgaccttacggacaacaggtgagccacatctttcacatacaccattaactacttcttcattagcaagacctaccttacatgaagtacaccagttgataggcatctcctgcttatacgcaagcccggccttaaaaagcttaagaaaaatccactgtgtccacttataataatcaggatctgtagtattaatctctctgtcccagtcaaatgaataaccaattgactgaagctgttccttaaaatgatctatattattcttagtaactatcttagggtgaatcttattcttaatagcatagttctcagttggaagaccaaatgcatcccaacccattggatataaaacattatatccctgcattcttctctttcttgctacaatatcaagcgctgtatatggtcttggatgacctacatgaagtccctgtcctgatggatatggaaactctacaagtgcataatactttggttttgaataatcattagttgcagcaaaagctttttcatcctgccatacctgctgccacttcttttcaactgttttgtggttatatactgccgacataacacattcctccttaaaaacgcataaaaacattctacacacatcactttaatttgtcaattaaatagccgcctttacattattgctttaaagtgttaaaataccactattcgcatgaatattaatatttcttacatggaggttataacatatgaagacaaaggttggattcataggtttcggactcattgcaggatccttagcccatgcccttaaagaaagcggcagggattatcatataactgccacaagcagacatttagaaccagtaatcgctgcggtggctgatggtattgttgatgtcgctgctcctgcggtagacgaaacatttgcacaatgtgacataatcctgttatgcacacctgtaattactatcacagaatatcttacgaaattaaaagtcattgccagtccggactgcataatcaccgatgtcggaagcgtcaagactatcatacatgaagcagccgattcattaggacttaatgaccgctttattggtggacatcctatggctggctccgaaaaaacaggttatgagaattcaggttcatcaattataaaaggtgcaagatacataatcacaccaaccaaagaaaccaagcctgaaaaaatcgaattaatgaaacagtttgcatcagatgttggcatgcgccctatcgtcatggattatcatgttcacgacaaatctgttgccgccataagccatgttccacatcttttatcaactgcactagttcatgttgtatcggacaatgatgacgaagaaaagcacatgcagttacttgccgcaggctgctttcgtgacatgtcaagagttgcagcttcttctcctgaaatgtgggaacagatatgtttgactaacagctctgcaatcagcaacattcttgaacagtatattgaaatgcttgaaacaattaaagataacatcgataaaaagaccccaggctatgtcgccagtcttttcgagatgtcaagagaatacaggaattccttggaaagcagacacccagagcattgatgccctgggtgtttgtgtttatccagtattaaattgcatctcttttggacttcctctgtgcctatcactactttaaagtccaatttataccaggctagaatatatcatatacaccgttggagctgcctgtctgtggcacaaaattgaattatggcgagctgtgcaggagtcaatgtcgctatatacataagttcagtgcctaaaagctcgttcaaacatagtgcgtttgcttttgggcactgtaaaagactttgtagatagcgacatttactcctgctaagcgcagtcatactgaaattttgtgccacagacaggcagctccaatggtgtatttcatataataactgtcctcatcacaccttaaaacagccaccgcctacgaattcccgtaatatagaatcgattggtacgttctcgtagccgcatggaaggaaatagttcatgaacttaagcagtctgtttgcttcctgatattcagggtcagcttctgttacctgaaaaagtataggctcaacgaatggttttaatacgcatggttcatatggcattgctgagttaaacataacatccgcctgctcctggaatgggaagatattcttctcttcacctcttcttacagactcccacatcgaaagagtcttctttgcagatgctcctcttgtcctgtaatctcttacaagccttcttaaaagtcttccatctgtagttgataccctgttatgttcgtcaacattaagctgtgtaagtgcactaatatatatcttgaacttactgtctattggaagtgaatatgataattcatcattaagacaatgaattccttctattacaagaacatcctcttcccctaactgtaagaaattaccattatattcctttcttccgaacttaaagttaaattccggcagctccactttttctccgttaagaagtctggtcatatgctgattaaaaagttcaatgtctactgcatgaaggtcttcataattgtaatcaccattctcatcaataggtgtctgctctctttcaacaaagtaattatcgacagcaattgggtgtggcttatatccattagccataagctgaattgataatctatgtgaaaatgttgtctttcctgaagaagatggaccggctatcatgatgaatttagtatgcggtcttttctttatctcatcaactatctcaacaattttctgttcctgaagtgcctcctgcgtaagcataaaagaagtcatatccccattagttatatggtcattaagttctccaaccgtagacatgccaagcatctttgcccagcttgtgctttcctttaacacattaaacagctttgtttgtggattaaattcaggaacttcaagaggtgcattcttaaccggaagctgtaacactattccctcgtcatacaggaatatgtcaaataccccaagcatgcctgtagaagatgccatatatccgtagaaataatctttgtagccattcaggtcatacacattaacaaatgaacttcttctgtatttgaacagtgatgtcttatctgtcattcctttttctttaaaaagattcatagcatcagatatcttcatcagctctttcttgattggaagatccttctcaaccatactgtgcataactgacttaacttcatctataaactctttgtcaggtctgaagtctccatcaaatgtgcagtacagtcccttgcttaaagaatattcaacaacaactctgtcaatattcctgtctatcttatctatagctgcaagcataagaagaaccacgcttcttctgtatgtctcgttacctattgatgtcgaagttgtaacaaatgtaacatcactgtcagggatatattcttctccaagttctttaagcttaccattaacattagcgagtataatctcatccttatattcgttctgcttctctgctgcaagctgtgccagtgtcattcccatagcatcctcctcttacgcatcagtcataatatgacaatgcatccataattatattattcttctgcaaaagctgctgtaatcttaacttaaccgtaggattactttcatctttcttaagactgttacttatcccatcattagtttctttctcttttataagatattcataaagagtcttatctttgctctctaaaagcttccatccgtactgatattgcgtctcactgtattcacaataaacattttcgtctgactttctgcatttgataataaaataatacttaccgtcttccttaagcatcttctcatcatcaacaaccaatctctgtgaaacaagaaaatgtctgaaatctcctacttctgactgcggtgatactataagtgttgtattccgggtaataacattcattcccttagttacaatatcagctataagcctgccacccataccacatatggttataatatcagcttcattcgctgaaagcttttccaatccgtctgaaagtcttgtctgtattctgtcctctaaacaattatcacatatatgcttctttgccttatcgagtggaccttttcttaaatccatcgcaatagcagaccgagctattccttcctgcacaagatatataggaagatagccgtggtctgtccctatgtcagccacgactgctcccttttcacacatatgtgcaactgttcttaatctgtcagatattcttaccatagcttaatcctaatcaagataatctcttaacttacggctgcggcttgggtgtcttaactttcttaaagccttggcttcaatctgtctgatacgttctcttgttacattgaattctttaccaacttcctcaagagttcttgctcttccatcatccataccaaatcttaatcttaataccttctgctctctttctgtaagagttccaagtacttcaacaagctgttccttaagaagtgtagaagctgctgcctctgccggaacaggaacattatcatcctgaatgaaatctccaagatggctgtcttcctcttcaccaataggtgtctcaagagataccggttcctgcgaaatcttctgaatctctcttactctctctacaggaatatccatattctctgcaatctcctctggtgatggttctcttccaagttcctgaagcagctgtctctgtactcttacaagcttgttaattgtctctaccatatgaacaggaattcttatagtacgggcctggtcagctatagctcttgtaatagcctgtctgatccaccatgtagcgtatgtactgaacttgaatccttttctgtaatcgtatttctcaacagcctttataagacctaagttaccttcctgaataagatcaaggaactgcataccacgtccaacataacgttttgcaatacttacaacaagtcttaagttagcttctgcaagtcttttcttggcttcctcatctccttcttccattctcttggcatactcaatctcttcatcagcactaagaagaggtactttacctatctccttcagatacattcttaccggatcatcaagaccgattccatcaggaacagaaagatctatcttctcaatatcaatctcatcttcatcatcaagaataatatcctcatcttcatcaggtacatcattcattcttacatctactttttttagctcaagaatttcaaataccttctccattctgtcagcttcaaaatctgtatcctgaaaatatgtcataatttcctgataatcaagtacattctttttcttcttggctattgcaagaataccctctatcttctcccagaatttagcttcctgtgcttctgcatcatctgcgtcactgttttctgtctcttcttttacttcttctttaatctcatctttcttagttgtcttctttgctgctgctttttttgcaggagtcttcttttctgttgtcttttcttccttagtctccttaacattctcttctaatgtttctaccattttcttagccatttctcttctccattcttcttcgcgtaacacgctctatatatttataacttaatatgaatctgattcagcttctgctgttcaattattatctcctgcatacgcttcgggtctacagtcttattaagttcatgattaaggctgttagccttaattctgataacaatgtcattaagagtcttttctctttccagattattaaggctctcatccaggtctgccgaaaacattgctgcgacttccgtatgttcttctgttgttgcataatcagctataattgcagcagggcttatatttcctgtcccatactgttcatatactttctctgccacacccgaaaataacgggtcaataaaatcctctggcttaatgtaagctgcaaccttatcgaatatgtccctgtcacttatgagccatgtaagaagcattttctctgcctgtcttaaaccatcttcacgcttcttcttcggcttacgctcaacagttggctgcggagtacctgcacctgcatttcttgaaataatcccttcctgattaccaagtcttgataccatctgcctcatgccatcttctggtatcataaactgcctgcacactgctttcaggtaattatcacgttcaagcttttctttaaatgtaacaagctttgctgcaacttctctttcaaatgcagtctcgctttccggatcccccctgtcgtaatttcttaacatggttcctatctcatacataaagctgttctctgcattatcaattctttcctgaaatgcctctgcacccatagccttaataaactcatcaggatccttatatggccgcatattaattaccttcgttgaaagccctgcttccttaagaatcggtattgctcgaagtgccgccttaactcctgcctcatcactgtcataggttatgagcacattatctgtatatctttttaacagccttgcatgtcccggtgtcagtgccgttccaagtgacgcaaccgcctggttaaagcccgcctgatgcattgatataacatccatatagccttcacatattatcatgttaggctttcttgatgttcttgctatattaagtccatacagattgcggctcttatcaaacagccttgtctccggtgaattaagatactttggcttggcatcacccataactcgtccaccaaatcctatgaccttattattaatatccataattggaaaaattactctgttccagaacttttcatgaatacctctctcataagtaaaaagtcctgattccttcagaatatcatcatcataacctttgtccttcaacagcttgtacagattacctgttgactgtgttgcataccccagtccaaagctgttaattgtactgtcagacaattcacgctttttaagataatcaagaccggctttcccattctcacttctaagctgcctgtaataatatgtggcagcaatcttattaatctctaaaagcctgtctcttatccctctttctttgcggtcttcttctgacatagacgtctgcggcagtgcaactccggctctttcacccagcatcttaactgcctctaagaatgtcatattctcatattccataacaaatgttatgacattacccccagcgccgcatccaaaacaatgatataactgccgctgtcctgaaaccgaaaatgatggtgatttctcattatgaaacggacacaatccggtatatgaacttccattcttttttaatttgacatacccggatataacatcaactatatcattccgggatattacttcatctattacttctctcgaatacattacttcatcccttccaggcctttggtacaaagatttcctgaaacttacttattgaatactggtcactcatgccagctatataatcacacacaacctgctccggtctttcatcaaattctgttataaatctcttatatgtatccggcagtttatctgtgttcgcaacatagtatctgtacaattctgttatcagcttatctgctttcgcttcctcacttttagctgtcggattaagatacagactttcaaacatgaattttcttaattctgtcattgctttacgtacaggttctgacattacaagatcattctttcctatgctgttcattattatatcgctaatcatcgtattaagtctttccttggttgaattaccaagaacatccgtatattctgacggaatgtcgctttccttcaatatccctgctcttattccatcatctatatcatgattaatatacgctatcttatcggaaagtcttactgcttttccttcaagagttgatggattacctgatgttctatggttcaatattccatcacgcacttcccatgtaaggttaagtccctggccatccttttcaagaaattcaacaactcttatactctgtctgtaatgagcaaatcccataggacataaagaattaagtgttctctcacctgcatgtccaaaaggtgtatgtccaaggtcatgtcccaatgcaatagcttctgtcaaatcttcattaagattaagcgcccttgctatacttcttgcaatctgggcaacctctaaggtatgagtcagtcttgttctgtaatggtctccctctggtgcaagaaacacctgcgtcttatgctttaaacgcctgaatgccttacaatgaataattctgtctctgtctctctgatatattgtcctcatagggcatggttcttcatctctgtcgcgtcctcttgactcatcagaaaaacttgcatatgggctgaatatcagatgttccctcttttcctgttcctctctaatgttcatctgtatgtgcctcccgcactgaaacactaattttaaagctcacaatttaattattcaacaaaacatgtgtttttccttttttattttttaaaatttttcacaaaataatcatttgttattatcattacccacattatggactgaaaaacccgccaaatgcccctgcagccacacatgcagctactgacatgacgatattattactactgtccggtgcctgtttcttcattattgcagctattaccaataacactgtaatatacactgctccatatataattcctataactactctcctcttttttatcatccatgcactaagcattgcacctgtaaagcttcctgccacatatattccaaatataatattatcaaccgctttctcatcaagtataaattttctcataaaatatgtaagaagtcctagcataagcagagttattacatatcctgcaataagagatttcaccatttttcttatataatccattgatttccttgttgtcctctttttattaattgtatgattaaaaatgttatcttatgattatctcttgttttctttaatgacacttgacggcacaatgtgtgtactgtaaaatgaaaagaaatattttaattttaagactggagggatttttcttggatacggatagtattatccaacttattgcaattgttattttattggttttatcagcatttttctcatctgcagagacttcatttatcactgtgaacagaatcaaagtgctgtctttagttgaagagggtaataagagggctgctcttgtaattaagattattgaccagccggcaaagatgctctctgctgttcttattggcaataatatagtcaatatcagctgttctgcattagctacatcatttacaatcagtgtatggggtaataaggcgacaggtattgttaccggtgttcttacgcttcttgttcttatatttggtgaaattacacctaagaatacagccaacatgtatgccactaatatggcaatggcttatgctcctataatatggatacttatgattgttcttacacctgttatattcatagttgaccaccttgcaggcttcttcttatggttattaagaattgacaataacaagaagaaagatatatttactgaggatgagattcgaaccattgttaatgtaagccagcaggaaggtgtaattgaatctaacgaaaagaaaatcattaataacctatttgattttggtgattcaacagctaaggatgttatgattccaagaattgatatgactcttgctgatgtcagttcatcatatgatgatataatttctctgttcaggcagacaatgtatacacgtattcctatttatgagaatacacctgataacgtaatcggcattcttaatattaaggatttaattgtcaatccttctgataacgatacatttaacataaggaacattatcagaaagccattctttacatttgaacagaagaatacttctgacctgtttaaggaaatgcagttaagttcaacaagcattgccattgtccttagtgagtatggaacaacatctggaatgattactacagaagacctgcttgaagagattgtcggtgaaattcgtgatgaatatgatactgacgaaaaggaagctttatctaagattaatgatactacatacagagttgatggctcatttaagcttgacgatttaaacgatgagcttggcactaaacttgaatctgaagataacgattcagttggcggacttatcgttgaaagacttgacagacttcctaaagccggtgataaaatcactattggtaatgtctggatgtttgtcgaaaaggttgcttctaacagagctgaatctgttattgtaaagattatacctgagaagaaagacgaaactaaaaaagctaattaattttattaaaaatgctgtgcattaacatcatcttgttaacgcacagcatttttattattaatacttatatattactgattaaagtgccttgattctctcaagtgccttcactgtattctcatatgaaccgaatgctgtcagtctgaagtatccttcaccacttggtccgaatcctgagcctggtgtaccaacaacattagccttctcaagaaggtaatcgaagaattcccagcttgtcatcttatcaggagtctttaaccagatatatggtgcattaacaccacctgatactgtgtatcctgctgacttaagtccttcaaggattgtctttgcattgttcatgtagtaagcaatctgctcgcctgtctgcttctgtccggcttctgaataaactgcctcacctgctctctgtacaatataaggagctccgttaaacttagttccatgtcttcttgcccagaggctgtgaagtgttacatctccacacttaagatccttaggaataactgtaaaaccaagtcttacgcctgtaaatcctgcattcttagagaatgatctgagttcgattgcacatgttcttgcgccttcacactcatatattgtatgaggaacatccggttctgaaatgtatgcttcatatgctgcatcatagataataacagcgccaaccttattagcgtaatcaacccacttctgaagctcgtccttagtgattgttgaacctgttggattgttagggaagcagagatatatgatatccggtgtttcttttggaagctctggtgcaaagttagtctctgctgtacaaggcatataaacaacattgctccatgcctgcttctctggaatataatctcctgttcttcctgccattgcattagtatcaacatatacaggatatacagggtcacatactgcaatcttattatctactgagaagatatctcctatattacctgaatcagactttgctccatctgatacgaatatctcatctgctgatatatcacatccacgcttcttgtaatcatggtctgcaattgcacttcttaagaattcatatccaagatctggtgcatatccgtggaaagtctcggcatgtcccatctcatcaactgacttatgtaatgcatcaattactgctggcgctaatggctgtgtaacatctccaatgccaagtctgatgatttccttatctggattagcctgctgataagctgctactttcttaccgattgttgaaaataaatagcttcctggaagctttaaataattatcgttaatcttaaacatatattcctccttattttctgccttgttttacaaaactaacgcttattatacatcatttttcattatgttccaagataaaatcttgataatctttcatattctgtattaattgcctgtaaaagttctttatctccatgcatattatcaggatgatatatctttaaaagtgccttataacgcttttttaaagatgttgtatcctcaacccccttgaagaatatctttacattttcagcattagacatactgcgccttgcttcacgataaaccttgtccttatatataagcttttcccgctcgaacttatctttatcaattgcaagctgtctggtttccctttccagaatattccatttttgttcaaataaatctctctgactctcaagctgtttcttaagcagcatattcttactctgctgtctctgaagcattcccatctgaatctcgatgagttttctctcatcttccagatttctgcttaattcctgcagccttatattctctttaaacagccatttcttcttctcatcttcactgcttagttcatcaaacattgcaacctccatatcagctccccatcaagccagccgcaaaatatatctaatcagattccactatgaaaccagaaaaccttcaatggtttttctgagtcaaccgttttcattgtatgtctgacacccgataatgctatgaatgaatcacccgctttaacctcaaactcttcgttgtcaagcctgacaaatccatttccttccaatacaaaaaatccctcctggtcatcatgaaatcctggttctggattaaactctgtttctgaacatattgtaactcctgaacaacagccattgatacatccattagcctctgtaaggaattttacacttctccttccttcttctcttgctgcaagtgcttcttccaatgttatatatggtttcttcataatcaatctccttctgatatataaaaaacggagtcccaggcatatgctgtaagaccccgttttattatgttctctattctgcctgttacttattctcgtatcttaaaagttctgtatatgcaaggaggaatggtcctacacctttggcatcatcttctacgattggctctgacatataataatcatatgtaccaggtcttcttccattaccaccaagtcctgcaacaagacagataccaccaagtgataatgaaccatcttccttagtcttaaggtatctttcacagataccatcgattgctttcttggcatactgcgcataatcatcagaaagatatccaagacgtacagccttaagaagtgcgtatgccataattgaacttccacttgtctcaaggtagttcttatccatgccaccataattaaccacctgataccacataccactctcatcctgatacttaagcattgaatcgacgagatccttaaatgcatcctcaagcatcttacattcagcatcatacttatgatccttattatcaacctgatcaagtgtatcaataagtgccattgtataccagccaatagctcttaaccagctgtgctgtgataatcctgtaaccttatcacaccagaatgcttccctgcttgtatccattgcatggaaataaagtccgttaacaggattcctcatattctcaattacgaacttgaactgtccgaaaatatcagagtaattctttctgtcattgtatcttgtctcatattcaagatagaatggaagtcccatataaagaccatcaagccatacctgattaggatatatatccttatgccagaagcttctggcttcattctggcatctaggcataatctctatctgtgaatatactaaatctgctgccttcttatacttttccttacctgtaaggtcatataattcaaataaagtcttaccagcattaacattatcaatattcttctcgcctatgctgtagccatctattgtaccatcttcaaagactctgtaatctataaaatcatctgcaaacttaagatacttttcttccttggttaagtcatacatctgaagaactgctttaatcatacagccatcaatatagttccactttgacttaaggccctgcttaatcttttcaatgttccatacaggagcatctggtgtgcttttttccagaagcccgtcaatatactttactactgcgtccattatttctgtctccttatcaacttaaatgggaaaatatacatgctattttacccatattttatagaaattgtacactaaaaaatgcctttaagcaacccatttttaacaaatatagccaaaaacacagatttttattgactatatactgattaaatacgaaaatataatcaataattcattataaatgcttttataaaaacaactcaattattttatataaagttattattcagaaaggtcagattatgaaaacaggaattgtatttgaaggtggtgcattcagaaccattttttcatgtggtgttatggatgcaatgttagaaaataaaattatgcctgattacatgattggtgtatcagccggtgctgcatacggtgtatccatggcatcaggacagattggaagaaacttaaagattcttattgattatagaaatgataaacgttatgtgggacttagcaatatggtacacagggataaccgttctctttacgggcttaatttcacatttgacactatccctaatgaacttgttccttatgattatgatgcttttcttagatataaaggtactttcaaatgtgttgtaactaatgtactcactggaaaacctgaatataaaactttcacaggatatgaccgtaccaaccagcttttacgggcaacgtgtgctcttccactagcttttcctcttatatatcttgatggaacaccttaccttgatggcggtttaagtgattccattccttttgagaaagcatttgaagatggctgtgacagagttattgttgttcttacccgtgaagcaggctatcagaagcagacaaccagttcagtgcggacccttgcaagagctttccttaaatatcctgaaattcagcgtgatattcttcttcgtgctgaacgttacaaccggtgcttaaagcgtcttgaacgctacgaaaaagaaggccgctgcctcgttatccgccctactaagagcaaaggctttggaaagattgaaaaagactttaataagattctttcaatgtataacgatggatataaccagacttattcgttaatcaatgaaatacagaggttttatcattaatatatgtagaagtacctgtattttagtctgataacctcagatattacttacactgggttcgtaataattcagttatcagactaaaatacaggtacttctttatatataaataataaattcttaaaaatttccgaacacaaagtcttttactattccgattgcttctcttaccatatagtttatgaagagtacatggtcgctttctgctggcattccacaggtattgtttaatcctgcatgtctggcaagaaggcggcttcttgctatatggaagttgttggttgctatgccaaccagtgaatctgtattctctatgtattgtactgaatacttcatattctctgatgtatctgttgaattatcttcctgtattatgcgtgagccatctattcctttagatacaagataattatacattgcaaatgcttctgttgtattttcaccttttcccctgccgcctgatactattattgttgtatcagggttatctattgcataggaaacagcaacatctaaccggttcttaagtgaccttgttatgtggtcacctcttatctgacaaccaagtactattatataatcacagttatcctttggctttgcagtcattccttttattattaatacttcaatgaaaataaacagcgacacacctgctgccattatcactataaaacatattcttaagacctttgccacatgaattatacctttaatttctaataatctcactgcaaatatcagtccaaaaaagacagcacccatcagccatataaatataaatgatgaacccacccctgcgtatgttgcacacactatataatatcccaggcatataagtgccagcacaagccatattgtatacataaaactactattctccgttactttttccatactttattccacgctcatacatcaattatcctgcataatccacatttttacccgcaaattcaggataatctgctgatttctggttctgtccgtaagatgtggcaggatatttaattgctgtattggtgacaccacctgacacatacgaccttccgcactctggacagacagccgttttaagtgtaactgtcgcattcagtacttcgccatctttactggcagctttcctgttcgcattagaaacatgctcctgttcatgtgccataacctttgtggccgctgctgacgggtcaatatgtgctgcactcttaaatgaaacatttacttcatctgaaccatccttatattccctgttcgcacatgtttcacattccacctgtccggaacgcttcattgctttaagtcttgcagagcttatatcctgtgtatcaacacctgctacattaacagacagatttctattcatatcattaatgccgttaatcatcatcttaatgtgcacccccttcatgtaaaatgtttaaacaatatatctgtatttaatataacatagtttgataattatgctagttttttttgatgtaaaagtttaatatatacatacaaacaatcaataatatagaaacgaggtattatatatgtttacatttaacaaagatgttacagctactaactgcgaacctggtgttacaagaaaaatattatgctactctgatgaccttatgatgtgcgagattcattttgaaaaaggttctaagggcaatttccatagccacaagcatctgcagattacttatgttgctaagggaagctttgaattcactatcggtgatgaaactaaaatcgttaatcagggcgacagcgtatacatgccttctggcgtaacccatggtgttacatgtcttgaagaaggaatcctctgtgatgtattcaatcctatgagagaggattttcttaagtaaaatgaaggtaccatttaatattaatctttcaggtaaaactgctgttgtaaccggaggaagcggaactctctgctcagccatggcatatggacttgccgtatgcggtgctaaggttgcaataatcggacgtaacaaagaaaagcttgcttctgtttctgagaagcttactaaagatgctctggatgaatataacaaaaatgttattgttaaaggctacagctgcaatgtaattaataaagatgagctttcagctgcttatgaaactattaagaatgaactcggcagctgtgatattctcattaatggtgcaggcggcaaccagcctggtgcaattacttccatcgagatgttaaagaaagaaaaagaagattctgactattctttctggaatcttgatgaagacagaatccgtgatgttatggatcttaattacatgggaactcttcttcctattcaggtatttactaaggatatggttgaaaagagaagtggcagtattatcaatattgcctctgtaacttctattcttcctcttactaaggtcatggcttatggcaatgccaagagtgctattcttaatcttacacagtggcttgctgtacattttggagaaagcggtatccgatgcaacgcaattgctccgggcttctacgctgccgagcagaatcatgatctcttattcaatgcagacggaacatacacagaccgtgccagaaagattattgccggaacacctatgggacgctttggcaatcctgaagagcttattggtgctgcactctttcttgcaagcgatgaaacagccagctttgtcaatggtatagtgttacctgttgacggcggatatagtgcttatagcggagtgtaggattctttagttggaaactgtatataattcagggcgatgtcagctttgacatcgccctttttgttggccagccacacaaaagcctacactacaactctgccctgataatctcagctgccttaaccatattcttaaggcttgcttctgtctctggcacacctcttgtcttaagtccgcagtctggatttacccacagcttgtctttgtctatctttgttagcattatctttattgcacgggtaatctcttctaccgacggtattcttggtgaatgaatgtcgtatactcccggtccaacctctgtttcaaagttgttttctcttaatgaatcaagaatctgaaggtctgagcgtgatgcttcaaatgtgataacatcagcgtccatatcgtctattgctgggattatatctgtaaattcactgtaacacatatgagtatgtatctgtgtttcaggttttacgccgcttgcagtaagtctgaatgctggtattgcaaaatcaagatattctgtattccagtcagattttcttaatggaagcttttctcttaaggctgcctcatcaatctgaataatcttaattccatttgcttcaaggtcaagcacctcatctcttattgcaagtgcaatctgcgaaattgattccttgattgtaatatcttctcttgggaatgaccagttaagaattgttaccggacctgtaagcattcctttcattatcttatctgtaagtgactgtgcatacacagaccactcaactgttatcggcttcttgcggtaaacatctccccatataacaggtggtttaacacatcttgttccatatgactgaacccatgctttctctgtgaacagaaaacctcccaacgcttcaccgaaatattcaaccatgtcatttctttcgtattctccatgaacaagtacatcaagtccgattttttcctgccatctgacacattcttcaattttcttcttattaaattcaacatactgttcttcgctgatttcacccttacggaatgctgaacggttggccttaacatcttttgtctgtggaaatgaaccgattgtagttgtaggcagcttcggtaatgcaaattctttcttctgaagctgctgtctctcacttcttgcaggaagtcttctgtaatccgcctctgtaacttccgcaagtcttttctttacagcttcattatcacattttcttgtacctgcaaaaagcttcctgtttgtcttgaatctttcatcttcttcaatatttccacactcggcaagcacgcttaattcctttaattccacaagcttttcttctgcaaatgcgaagtaattcagatattcatccgaaagtttattctcatgctttaatgtatatggaacatgctgcagcgaacatgatgttgataaaaccgtctgtattcccttatcttcaagctttttaagaacatttaaagtcttttcataatgattcttccagatattctttccatttacaagtccagcgaataataccgtgtcctttggaaatccatatttttcaatgagttctgctgtcttctttccctcaataaaatcaagtccgattccgtcaaacgacagcttgacaatatcttcatacacatccctcacgtctccgaaatatgtctgaagcaatactttgcatgatttcttcttacctaaaatatcactatacattttgacaaacagttctctgtcttcttctgtcatgtcctgtacaagtgcaggctcatcaaactgaagccactggattcctacagcttcacatttgctataaacatctttatatgcttcaataaatgcattgataaaatcatctgccctcttcttgcctgtaaatctgcacagcttaaataaagtatacacacctgtgattaccggttttgtctcgattccaagttcttttgcctctgcatattctgcccacagcttattacctgtaagtcttatctgcgtgctgtcctcaacctctggaacaatataatggtaattagtattaaaccatttcttcattgcaagagccttaacgtcaccgttctctccctgatagccccttgccattgcaagatatttatcaagctctgaaacctcaagttccttgtatctttcaggaattatattcagtaaaaatgctgtatcaagcactatatcataatatgaaaaatcattgcttgtgatataatcaatccctgcctctttctgtataagccagtgtgtctttcgtaactcctttgctgtctgtgtcagttcatctgcacttatttcttttctgaaatatttttctaatgcaaactttaactctcttaatgttcctatccttggataacctgctactgctgtcttcatacctgctctcctcatctataatttgatgttgttattataaatttgaagaacgcatttgtataatacataaaaaaacaggttagtcatagtttaaaactatgtccaacccgttttatatacatataatgactacttaagatacttccttatagcctcaagatatgtatttccaagcctgctaagtatcccttttttgtgagttatgtaaccaatatgcatatctgattcatcagcaagcggcactgctataatgtcttttccgttgagcttcttgtcaataataccactacttactgtgtaaccattaagaccaatcagcaggttaaaaagagttgccctgtcacggactcttatgttcttctttcttgctgtctctgaaaatatctcttccgaaaaataaaatgaattatgttctccctgctcgaatgacagatacggataatcctctaactgctcattgcttataacatcacactctgcaagagggtgctttctgcttataaatacatgcggtctcgcagtatacagttcatgaaattcgaggtcgtatgacttaaaaatcttcttaaataccgcctcgttgaaattattaatatacagaattcctatttcacttctaagctttgcgacatcctcaataatctcataagtctgggtttctcttaagctgaaatcatattcgttctgtccgaactgcttaataaggtcaacaaatgcattgacagcaaaagaataatgctgtgttgatatacaatattgctttcttccaccattatcgcccttatacttgtcctctaagattgccgcctggtcaagaatctgtcttgcatacgataagaactcttcaccttctttagatacacttattcctttattagttctgttgaatatcgtaatattcatttctttttcaagttcatgaattgcattcgtaaggctaggctgggaaatatataatttccctgccgcctctgtgatagttcctgtctgtgcaactgtaacaatatattttaactgctgtaatgtcatacccttacctgcctgaaattttttaatattataacacatttttgttgttttttaaaaaatattctgttacaatcaacccgtaaaataatctgattatgaacggaggtggattttcatggatagttgcgatcgtataggacgaagtaagaactgcggtgtatactataagtgtaggctcggaatgtggctatctgtgagaatctcataaccacattctaataaattgtgccttttatacatcgcatcagaggatccttactatcacaatcatctgtagcgatgtatttttatgcccaattgaggcaagaaggaggtcacaatgaacaaagtattattcccgaagaaagattatgtaaaagaacttgtcaggatttttaagtcatctaagaattcacagaaattagttaagacactttctaagtatcatgaaaaagatattgctgaagcaatcactcttcttacacctgctgaaagacatcatatatataacgttcttgatgaacatatgattgctgagattttctcttatcttgatgatgctgaaaaatatcttgaagaactgtcattagagaaagctgcacgtgtagtatcttacatggattctgatgatgcggttgatgtacttgacgatttgtcagaaactaagaagaatgaaattgtagaacacttagatgctgatgcaaaggaagatgtccagaagcttctttcttatgaggacgatgagattggtagctgtatgactaataatttcatatgcataccggataatcttactataagagaagccatgagcgcccttgtcaagcaggctggcgagcatgataacatatcaactatatatgtagtcaatagtgttggcaagtttgccggggcaattgatttaaaagatttaattatagcgagacagaatgataatcttgccgacataataagcagttcgtacccttatgtatacgagcatgaaaatatcaatgaatgtattgataagattgcagattacgaagaggattccatccctgtacttactgatgatggaaaaatatgtggtatccttactgcaacagatatcgttgaactcgttgatgatgcaatgagtgatgactatgcaaagctcgccggtcttacttcagaagatgatttaagcgagccaactcttgtaagtatcaggaaacgtctgccttggcttattatactgctgtttcttggaatggcagtttcatcagttgtaggaatatttgaatcagtagttgctgttcttccgattgtaatatgtttccagtctctcgttcttgacatggctggtaatgttggaacacagtcgcttgctgtaactatccgtgtgcttatggatgagactttaagtgccaagaaaaagttatcccttcttttcaaagagatgaagataggtttcattaatggtgcaagtcttggaatcatggctcttgtattcttaggtgtctatattcatatattcaagaaatatgcgtggatatcagcatttttaatatctggctgcgtcggattatctcttattgttgctatggttgtatcaagtcttgtgggaacaattattccaatgtttttccacaagattcacattgacccggctgttgcgtcaggcccgcttatcacaactgtaaatgaccttgttgcggttgtgacttactatggtcttgcaatgatatttcttgttgagatatttcatgtgtaatataaatgtggtgtcatattctaattgatatggcaccacattttttactttatttactctttaaataacccgaacagcttaagcagcttctgccagaaattaagtttcttggctgtatctgctgtatctgttgcaacctctgcaactccgtctgtgttctcattgattccactgtcaaactgtccgtagctttctgtaagctgtgtaaccgcagtccctaattttaatatatttgcagaaagattgataaaccagatactgccatgaaaaccttctggcgtaacaacgaacgctttgccgacctcttcaatgctgtagcttttaatggcaggcaggttattaatcctgatgaactaactgagatggataccgatgtttccggtattattcaattcaatgattacaatgaatctcttgtcagaacaagagacattatcaagaagttccataatggtattgaattcactattcttggtctggaactgcagactaatccacactatgccatgcctgtaagggctttgctttatgatgggcttggttatcttaaggaatgtaatgaattccgtaatatacacaaggcagagcatgacttagactctgataccggctttctgtccggcatgaacaaatcggacaagattcatcctataatcacgcttatattctactatggagaatctccatgggatggtcctgtcactttatctggcatgatgactgacatccctgaagaactgcgtcctttcttttctgattacaagataaatcttgttcagatacttgattcaggacactatcaattttataatgaagatgtcagaagtgtatttgacattacacagaagatatatacaaagaatcttcaatgattgtctgaagaatacactaacaaatcaatagacggcgaaatcatcaatctggtaacaacaattaccggtttttccaaattatcagatatatttaatgaattagacgatggaggtgaaactcccgtgtggaaatgtgttcaggagatggaagatgagtgggttcagaagggtgttgctgaaggcgaacgtaaaggagaaattaaaggcatgcaaaaagatcgtcagacagcaattattacaatgattgagctcagactgaccaaagagcagattcttactaaatactcagaggaagattatttaaaggctgaagaagctcttaataattagaataattaactttaaaaccagacaggagcatgttaccgggtaaatagtaacatgctcctgttctttatgaaacctgtctatgattagtaacacagaacctgataatatatacagcaagcagttcaattatcacaatagccgcaatgattatcatatatttattaaagctgtgtatatctgtcaatgtatgcaacagccatgaatacatcatacttgtaaagcatgctcctatcagactgtacgctcttccagtctctccttcatattttcgcatgctgacataattctgaataataagcaatgcaagattaagtataaatattataataagctgcacatttataattcgtcctatatttccgtctatcttccatgactgaatttcatgattattaaatatgccagtcacaattatcatcataataaaactgtatgccatacttccaaatccgataatattatatatccgcttatccgcattttctctatttggatctgcaccgattaatctttctttcagaaacacaactacaagaataacagcaagagatatcccaagataatacattcccgaactgtcaatatgtcccctgaatgagtaccacccacacataagcatatatccaacaataataacagcaacaattcctgttataagttctcttttctttactctgtcctgcagctttgccactctcacaacttctgtaaccgctgtttcactgtcggtattcttctccttaatctcccctattacaatatcctgaatccttatgtcaagtattcttgataactcttctataacacctatatcgggaaaactgtctcctttttcccatctggaaattgctttgttagtcactccaagcaaatcacccaattcaacctgtgtatatcctttcttaattctcgcactcttaataagctcacctgttttctgtttgtccatagagctacctcctgattgtagtattaatatcacagcactgttctttgtctattaaaatgttactaacaaatcttagaaatagcaatctatcatagcgagaatcggggaattatcttccttatttttcataagatgctcatcttttgccgttgtaaaatattcatcttttatatgatacgcatatccttgttttatctccatttgtcctccataataccctaataaaaaacaaaaccccttcacttaaactaagcgaagaggttcatattacacaatctcaagcacatgctcaataacattcttatccttatcaacaccaaatgccttaaacacaggattgtcattatccataaaggacataatcatatatacagcagtcgaatcatatgccagtctcttatcctcctcggaaggtcttgaaggagtttccgggtgtgaatgaaagtttccaagcatggttaatccaagacttcttgcatccttgactgctacaaactgttctttaggactcatagtaaaatgtacattattatgatcaagattagtaagaaaatacaccttctcaataaccttaacatccccatcagtaaatcccgcaataagcccacaagattcatccggcagcccatctaagcaataacgtacaattgaatcataatccacctttttaattcgtataaccatacctgtcctccaaaacaaaattatcactttcatacttatccagcgtaagccccgcgcacacgctgaaagagaaaacatatataagcagaataatgagataatcatgtgcagcgcactttggagtcaccggcacttagcaagccaacgccttcggcgttggcgagcttagtaccgctgtgaacgacaagtagcgaaagcgtgcctgcacatgattatcccattattctgccatcacatatattttctcttattacttatgcatatcacattcagcctgctcataatcaataagttcatgaattgtaggattatcgccgcatatagcacaattatgatcctttggaagcttaattgtatggaattccatctttaaagcatcatatgtaagaagtcttcctgtaagaaggtctccctttccaatgatgtacttgatagcttccattgcctgaagacttccgataacaccgcccattgctccgataacacctgcctgcttgcatgttggaactgcatcctttggtggtgggttcttgaatacacatctgtagcatggtccttctcccggtacataagtcataagctgacccttgaatcttatgattccggcatgagagaaaggctttccagccataacacatgcatcgttaataaggaattttgctgggaaattatctgttccatcaatgatgaaatcataatccttgataagctccataacattctcagatgtaacgaattctctgtaagtcttaactgttacatcaggattgattgcttccattgtttctttagcagatttaaccttagctttgccgatatctgctgttgaatggataatctgtctctgaagattagataaatcaacctcatcagcgtcaacaataccgattgttccaactccggctgctgccagatacatagctgcaggagctccgagtccacctgcaccgattataagcacgctcgcattaagaagcttcttctgtcctttagctccaacttcctttaaaataatgtggcgcgaatacctttcaagctgttcattagtaaacgccattagtatgctcctcctcccatgaaatataagaactcaactgcatcgccttcatttaactttgttgtctcaaaatcatctctctcaacaaaatcatcattaacagtaactgttacatattccggattctcaacattctccttaacgataagctctgctactgtaattccatcttcatattccttcttgtttcctgcaactgtaatcttcataacattcctccctgtaattaaatctcatttcttgcgccgtttattatactaatccttcaaataatccaagcagtgcatccttagttgtctttcctgcaattctgcctgtctcagcacctttgttgaatgcaacaaatgtaggtgctgccaatacttcatatttagaagcaagcgattcatcaaagtttacatttaccttgtaaacattaagctttccctcgtaatcatcttcaatgtctcctacaacccctgccatcatcttgcatgggatgcatgaatctgaatagaaatccacaagaaccggaagttctgacttaagaaccagttcttcgaaattctctgcattagctctggctgccataagccctcctttccttaatcctcgtcttctacctttcttacgataagagtatatgtaccatcctcattagctgtaagctttaatatctgatgtccctcttccttaatacttcttggaacattctgaacaggctcaccgtcattcattctgactgcaagaatctgtccgtcatctaactcctcaattgctacctttgccttaacaaatgttgttgggcagaccacatcagtaatatctactgtatcatcaatctcaaaatcagccattgtatgcctccttaatcttcttatagaattcttctcttccaactctgtcgagtgtgaacttaaatctttcacttggctttgcgttgtctgcaaagaactggattgctgcatcacaaacacggaataactgttcttcatttctgataagcggaagtggtgattcacccttgcttatagaattaccaaatgttcctgcaaatgaaatgatatatgcagaaggtgcgtcccacgcatctgttggacaggatttagcgcatctgccgcagtaattacatttgtcataatcaactgcaaccttgccatcctgtattgtgattgcacctgtacgacaggccttctcacatacaccacagccaatacatttgtcttcaatccacttaacatcagcagcgcccttgataccaacatcattctcctctgccttaagacagttgttctgacatcctgtaacaccgaacttgaacttgtgtggaagctctcttccgaagtatctttcgtctaacttaactgctatgtcatatgaatctatgttaccgctaggacatattgtattgccctgacaggctgtgactgtacgcactctcggaccacatacaccaggtctgcagccgccctctgcaagttcttccttaacagcatctatatctttaagtttaataaacggaatctcaacgccctgtcttgatgtaagatggacatgtccgtctccatatttgtctgcaacttctgcaatcttaatgagattctcggctgtaagatatccacctacaaccgcaagacgaagtgagaagttattcttctgcttctgtctcatgaatccacccttcttaagtgttccataatcaactttctctgccataatatcctcatttccgtgccatgcactattcattatcagtagactctaaggctgctctgaaatcttccttaagatcatctatatcctctattcctacgctgactcttatcagatcgtcatacactcccgaagcttccttatccttatcgcttagatgaagtgctatagtagaagccggatgtataacaagtgtcttcgtatctcctatgttagaaacaatattaggaatctttaatgcatttataatcttaaatgctctctccttgcttccaaccctgaatgttattatcgcaccatagcctttagtaaactgcttatcagccacttcatgatacggactgctctcaagtcccggataattaactgtaattccttcaaatgtgtctaagtatctggcaagttcatacgcattagaacagtgtctctccattctaagccctaatgtctcaagtcccagattattaagaaatgcattctgtggtgaaagacatcctcctgtgtttctgaataatccgttacgaagtttaattatatatgccattggaccgaatttcaaatatggtttaagtcccggatacttttctttatcaaacttgaactttccattaaaggtaagtattccgcttatcgcatcactgcttccattaatgtactttgatgatgaattaactaccacatcagctccaagtgtaacaggctgtataagatatggcgttgataccgtattatcaactataagcggaattccatgtgcatgtgcaacatccgctactgccttgatatctgttacatcaagcttgggattaccaattgtctctgcaaatacaactctcgtcttatctgttataagttcctcgaagcattccggcttattatcagccacatatttaactgtaatgccaaagctttccaggtcttcaaacagttcaacagtacctccatataatccacatgaagcaacaacctcatcaccctgtcttacaatattggctatagaattaaatattgccgccattcctgaagaacacgctacacttgaaaaacctttctccagtttggtaattctcttttcaaatgcttctatagttggattgttgattctcgtatatgagaatcccatcgccttattatcaaatattctctccagttcttctgcactctcgtgcttaaatgcacttgactgatatataggaacaagtgttgctccgttaggataatcgtcaacgccatcatgcagcagtgatgtgttaaaaccactcatatatttctcatcctttcatctgttatgcgatgaacattcaatatttaatgaactgtccatatattaaacccttttacctagtatgtcaataggttatttaagaaaaaatatgactgcctgaataatctcaggcagtcatgaactattattaacatttactatataatataactgtctattcccacattagaattaaccagatctgctattgtaatattgccgaagtaatcattaacaagcttctcaaaaccttcccacatctgtaaagtcttacattctgccgccttcggacatctgttaggcttcttctcaagacatgcaaccggtgcaagtgaaccttctgttacaagaagtatactaagcactgaataatcctccggattgcgtgcaagcttatatccgccaccctttcctcttagtgatatgaggaactcattcttgcttaatgttgcaacaattgcttcaagatacttctcagaaatatcctgtcttctggcaatatccataagtggaatatattctcctgtattatgttccgcaagatcaatcatgaccctgagtgcatatcttccctttgttgaaatcttcatatatataacctcatttcttataacacattaatactgtatgttaaacatactttaccacaatgtttgtatatttttcaagtgtaaaataaatttatttgacgggaatgcttgccgcaacgcataattctccccagcctctggctgaatcaggccatacatttcccacccgtgttgcaccatttataaggtatgctttaagcttttcaccatacatatattggtcattgcccttcacaatcccccattccatcagcatagcagctgcccccgtaaccatgggtgttgcaaaagatgtccccgtgacagttttctccttatttcccggaattctaatattaactcccggtgctgttatgtcaggttttgcatacaacataaggccgctttttacattaactcccctgccagaaaatgtggccgcactccccggagcacgcccattggcaccaacacatattgcccgcctcgaagtccctggtattgtaaatgtgtactcaggcgacggccttaaaaaacctgttgcactgcttaatgtcgaaaccggaggaagccacatattaaagaatccatccaacacatttgctgcgataaatcttatattccatattccagaagtaatatatccgcttgttgcaactatggctgcgtatatctcttcgcccatatagaatggtcccggtccatatgcctttgatatgacacgcatattcttaatgttatgatgcacaactcccgcatttctgtcacttataaccagattctcccctgttggtgcaataagttctattcgtgcattgtccattgcccttttccatatctgtatacttatctgcggctcataatcaccaattgcaagttctgcatccagtacatttccactgataagctgacctgaataatgtgttctgccttctccttcattgccgacccctatacatatactgcatctgtatgttgaacagcagtcatctataaacatttcaaatatcgaaccaccctcatgattgccataagttccgccataacttatattaaccacaaccggctgactatattcaatagcttttcttatgcagtaatcaacgcctctcataatctgcgttgtccttatgtatgcatttccccctgaatttcccagctttacaattaaaatgtcagcatcagaagcaacaccgcttcttccacatgcaataactgcaacttcattgccatgtccggtttcatcccttgccggcaatgtctttacagctccattcttgtaatcctccagtatactgttaatttccatatcagaatatgtaatacctgttgtctgatcccataacgccttaattcttgtattccctgagttatcaagaaattcattattacctatatctattcccgaatcaattaccgctacaagcacaccttttccagtcacgcctccatactgggtttcttctgcttttgcaacattaacacaggcttctgactttgctgcatacaattcaaagtataatgccttaggcttttcaataaatataatctctggttctgtggcaagtgcttcaatattataaatcgttgttcttacaatccagtatccacacagaagctgcgtaaactctgcatttgtataaatgcttctaatcctgtccagacttccagccgtcttgacaattatctcccacgttctgtcagagtcatcaaaccctgcatccatatcaggtacctgctgccttatatcttcacttgtatcagcactaatctgcaatagattctcaattctcggattcacacataattctccggttaagtttacataatatctatgccgacaaccacaataacatgaaaacagctgatgcatacgcaccagccgttaattaattcaatatcatgttttcttgataaattctatacgacacttaggacacttaatacttattctgccctttcccttaggaactcttatcttctgtccacagcttggacacttgaaaattctatgtgtcttactgtccttgattcttgctcttatcttgttaaacttactcatgaatttataatgaatcttcatgtacttctgattttcagcacttcttcttgatatatttcttgaaaacattctgaaatatatgtacacaataccaagaagtgctactgtatatattacattactccttaagaagaaggtaagtataatcaaaacaagaactacatatgataaacatctcgaaagctggtccatgccatatcttccatacataaatcttgaaaaactctgcttaaatcggttcataaaaaacattccctttctatatattgaagtaattcacatcaacatacatatggtaacatacaacccgataaaagcaattaaaaatgtataaaataaatatgattgttctatatattttgtaatgacacctgttcaatattcttctgtaatgtaccaatcaattcctcaataactataggtttggataagaaaccattcataccgcattccagtgctttttttctatcttcatcaaaggcattggcagtcatggcaagaatagtaatcccagccagtgccggatcattcagtgcacggatctgtttggtagcctcatatccgttcattacaggcatctgaacatccatcagtacgagatcataattacccggtgtcgaattcttaaccttctccaccgcctcagctccattttctgcagtatcaaccacgaagccatacgcattaagaagctccaccgcaatttcactgttcagttcattatcttccacaagcaatatacgtttgcctcggaaatctgaacccgcagccggaaggattgtatcctctgcaatcttctctgtatggtgtttctcagactgaatccgaaatggcagacagacaataaattcagtacctttaccctgttctgtctgaacatcaatcgttccgcccatcatatccacaatattcttggtaatagccatgccaagcccagtcccctgagtcctgctgactgtggaagtacgctctctctcaaaaggagaaaaaatcctctttacaaattccggactcatgcctattccgttatcctttacccggatctcgtacatttcactgccctttactgtccccgggaactgcttcaaccgtacagaaacagttcctcctgcaggagtaaacttaactgcattcgacaaaaggtttaaaagcacctgattcagtcgtgtcttatcacaatagacatcctcatctgtcacatccatgacatccatataaagatccagctgctttgcatggatctgcccactgatgatggtcttcaaatcatgaagtacatccgacagattgacctccgtttcttccaaatggatttttccactctcgatacggctcatatccaatatatcattaatcagtgagaggagatggttgctggatgaaagaatcttgtccagataatcccggactcttttctgatcatcaatattacttaccgccagtgttgtaaaaccgataatcgcattcattggtgtcctgatatcgtgagacatattggaaaggaaagtactctttgcccggtttgctgtctctgcagcacgtactgcctctgaaagtgcctgattcattttccagtcagcagtacggtctgacataaccagaataaatttctttttcccgtttatctcacagcacatcgcaatattatgaaaccagcgtttttcccctgttttcagatgaacatattcaaaatctccttctttctgttcatgaacctgaattccttccagataatttttctctgtatctccctgttctgccatatgcagttttgccagaatactactatccttacgaatctgttctaccgtaatgcccagcagtttttccacattcggactgatgtaatctgcctgatatgtttttgcatccagcatcaggaaaacatcatccacattcattgaaagcttttgaaacagctcatcccggtacagaatctccgtatcttttttccttaagtttgtcctgcttttttgaacaatcaggcttataaggaatgcggcaatacagaacacaatcgcactaactagaagtatcgtactgcgctgcaggctgttcatactggcattgacaatatccgcctgtacaagtcctaagaacatccagtcctggatatccgatttttcatagaccaaatagtagttccttccatccagatttaggagcatcgcatcggtacatcctgttttaaacttctccgaaagctcattgatttctttttcagacatatcagagtgctctcgcagaatgccaaagaaattatacacattaccccatgatgcagacgaatgatttaccacaacacgtccatccggatgaacaacaaaactctgagcatttccattaaaaacagaaatatccagtacatttacgatatcagagttttcataggcaatggcaatcgcatcatattcaaatccctgataaattccatgagccttaggagtggcaaaaacaagcagctgggattttccgggaactgctgcatttgcaataacatcatttccctgcctgatttcctcttcaatattttcctgtaatccaagatacccggtgttgcctgttacaaccttatagtttccttcagctgacagaaaataaaattctacaaagcctgcatattcctgcgctttctttatatagtcacggatttcgtcctcacttgaggtattctgcagattctcaccccacatatgaagataagtcagattcttatctgtaagttcccgtagcatgttatcagactgatgaaaaacttccgtcagatgagaaacgctttcctcataaacagttttcgatataaatccaaaatattggaaaaccagcaatacaacacacgcaaaaacagctagatatgccgctatactaaatcgttttctcatgccagttctctttctgtctttattatgattcttaatttccatacttctcacctcagagtcatgtagtcctcaggctctgcaagaacggcattaccatctgatacagctcctgtccaggcatcttccacagcagtatcttcttcatcaaacacaatattctcatctgccggataagctttcatgtgttttggtatcgcaagacagattactgtaaaagtatcattgtcctgaactttctttccgtcctttgtaattttactcaatgtataaccatcatctgtttctttgacttctacagaaatgccactaaacacaggcagtgagccacggttaaatgggatgaaaccgccttcatagccttctacaaagtttttaacagtctctttcagctcagctccactcatcttgctgctgtaggctgaaagacaatttggcatgatcatgcttcccgccattttgagtgtataacgggctttcagcacatttcccgtaaagctgtttccggttgctatcagcacatctgtcccatagatgccacgcagagtgttggccataaccgaatatgccgcatttccaccgttgctatgaaaacgattggaataagacttctgtgaatccaatattactttctcaggaatggatttctcctcaagaagctgagaattaaatgactgataagcctgctctgcatcatattctcctgaaatcattctcgaaaccacattcttggaaacagagaaaaagtcatttgacgcaatgcggatatacatatggttttcttctatcacaggtttcacatctttcagatattccgtaagcttaagattcacatcctgactgtagcttaacagatcctgtccatcactaataatccggttctgtgcatcctctgaaagcattgtgttcagcaccttcattgctttcttccggcgtgtttcatcctgagtcaggtcacggtttaaagccacctgaaaatatggtgtagtcataagccacttttcaccattcttctgaaagaatggaagaaatgttgtgttaatcccctgattctgaaacatttttactccagaagagcttccaaagtacatggcaagctttccactttgatacatctcaactatatcatcataattcatatccagatcatccgggctcagaccagtatcctggataaattgctccatgcgttcaaaagcctcaggccagatagtaccgtccagaccttctctcttttcattatcaggatcactgtaggcagtacgccacttgcgtccatctacagaagacaactctgatgctgacagaccctgcagtgtttccatacaggtataatcataataatagtctgcagtaaacccacggattcccactttgtcaaatgcctggcaggcagaaacaaagctttcataatctgttgggagagggatatcatacttttcaaaaagatctttgttaactacaaaaccgtgtgcatccgcacacactggaatccagtttacacttccatcctcattcataaaattgctaaggtagctgtcatagaccgcacctgctgcattggttgtagaaagatccataagactgtcttttaggggactcgcatcatgcagtgaaaaacgacaacaagttataatatccggcaatccaccgttttccttaagaaacttgtagaaatccagattattatttcctactacaaattcaatattgatatccggaagctgttcctgaatatatggtgcatatttttcatacaggcttgtgctccataagtacaccgtaattgtttccccatcttctttttctgcacttttgccgccacagcctgacaaaagtgatatagctgtcaccattaccagaaaaaccagcaaaactctgttacattttttctttttcattacgaattctcctctgagtttcctttgcatttttctacgccgtaaaaaaaacctatgactactgccataggtcttatttctgattgaataatagctcctgtcacatacaattatcctgctgctttcggcatattaatattccatgtactcttccccatcgaggttcttccagtagaacttatcgtccagtatcatataactgtgttctgagttttctttaggaattgaaactgaaccaggattcatgtatatgtaattatctctcttctcacacttaggtacatgtgtatgtccgcaaagtagaatatcgccttcctttaatgcaggtatattcttctcatcaagcttgtgtccatgtgcaagaacgattgatctgtcattgaaattaagatatgcctgctctgcaagtacattaaagtcaagcaccatctggtcaacctctgtatcacaattacctcttacgcatataatctcattgcgtaaaggattgagcattgcaataacctccttaggtgcatattccttaggcaggtcatttctcggaccatgatatagtatatcacctaaaagaacgagtctgtctggcttctctgcttcatatctttcaagcagctttctgcaataatatgcagaaccgtgtatatctgatgcaatcattatcttcttcatattctgtcctttccttatgtaaaccgattcttgattatcttgcaagcttattaaatgttggcactttataatgtgaagcattacttaaaaactgagataaagtattaggaaccttgtatgtatcaagtaccttcttcataaaagcaattgatcttttcttatacttcatacttcgtaatactgttactgcggctccatcatcatacccccttgcaaactgctttgcatatcttgcaaatttagttttatcaagttcaggaatgttaaaataattctggaatatctccattgcctcaataattctcgtattatcaaaatcaagttctactgcaggtcttttcacctctatattaccaatatgacatacagactgcttacacacgttagaatacaggcttatactatcagacttaacattcgtaagcgaatatttgttatacaggtgtattccggtaaacattccgcttgaattatcctctccaaagaaataattcagtaaaagctctgtaatatctccctgcgcatctgatttcttaatatacatgcctcttccaacacggattatctcaccctcgtcagagagtctttcgaccgcccggaagaatgcttcctgattcatccgcacaaatccatgctcatacatgtcattagccgacacaattgtgccatctgccacattatcaaagtaatctaatatcttatctctgttcttcataattctttagcatagtgaagttattacacttcttcaagattgattgtctctgtttcttctgtatcatcagcagattcttccttttcaggcttttcttcttccttgccatctgccttctcattaattaccttgacttcaacctcaacgtctccgtctttctcatcaaatataacatcatcatcaaaatcatcctctgatgcgaggcagtcatcttcttcaacaaaatcagaatcttcctcatcttcttcatcgacatagaaattaacaggaattacttctacattactgcatacagccttaccaataatatatactgtgtggattccttcttcgtcaacattatcaacaagattcttaacaccagctatctttcttgaaatatcacatgttgcattgacaccttctggaagaataatagttactgaacttgcattacttgagaaattaatatatacatccttctcaaacactgcaagaccgagatcaagtactgtcttagaggccactgctttaagctcgcagccagcaaatacctcatcttcaacctctataaccttcttctctccgatagcattatacttacggatttcatcatcaaaactatcattctcttctttagcgaatctttccttagtctgcttgaacttatcaaaagcaaccttgcctgctacagcagcagcgcctactcctaaaacaaccttagccaatccatgtttctttgccatagtattatcctccaattcacgcattataatgcaatctactctttaaatttaatcaccacaaaatcttgttttagtatatcatactccctatacaaaaatcaacgcgaatagacacatccgcaataattctgcctgtatagattatactcatgtgaaagctcaatagaacgcttatatccctcttttttcttaaaatcagataaaagatatggcatatcatattcctctgaaagctttaaacctatttcattaagcttgacgctgttctttagagggcttattgtaagcgttgtcgtaaaataatcaaatccaccagcctttgcagtttcacaggtctttttaagccgcagctcataacaacggaagcatctctccccgccttccctgcactgttcatatcctttagctatgtcatagaattccttagtatcataatcgccttctatgaaggaaactttatactttgccggaaattcactgatgaatctcttctgttcctctactctcttcctatactcttcttctgctgatatgttcggattgtagtagaatacagttatatggaaataatcagaaagatactctatgcaatggctgctgcacggtgcacaacaactgtgaagcagcagtgtcggtacaattccgtctttctggaagcccgctatcttcttatcaagttctttctgaaaatttctctgttcaaaaggtattcccatattacttaacctgtcctgttatctcttctaacgcagcgtaaagcttttccatctgctcatcagttcctattgtaattcttaagtaattatcaataagtggctggttaaaatatctgacaaatatgttcttttctttaagtttttcaaatatttccttagccgaaacactcttgtgtgttgcaaatataaagttagccttagagtcagggaatgagaagcctaactgtgataatctctccttagcattctctctggtcttaactatcttacccacgcactcttcaaagtattccttatcattaacagactcaataccatagcttattgaagttctgttcattgtgtatgaattgaatgagaatttgacatcattaagagcctttataagctcaggattaccaaagcagtaacctattctcataccagccattgaacgtgacttagaaaatgtctggacaaccagcacattttcatacttattgacaagctccattgctgactttccgccaaaatcaatatatgcctcatcaacaataacaactacatcctgattatgtttaataatatcctcaaccttatcaagttccatataaagtgctgtaggagcattagggttagggaataccactccgccattctccttgtaataatcttctggaattatattaaaagccttatcaagcggctgcttctcatatggaattctgtaaagatcagcccatacactgtagaatgaatatgagatatcaggaaacagtattggcttgtcagaattaaagaatgtcaagaagcacattgacaatacatcatcagagccaactccgacgaacacctgattatcattcattccgtaataagctgcaattgcatgtacaaggtctgtaacctcagggtccggataaagccttaaatcgctgatattcattctctctgctgcctcaagcaccttaggtgttggaggatatggattctcgttggtattaagctttacaacatctttaaccttaggctgctctcccggcacatatggctcaactcttctgatattcttctcccatgtcttcatatataagtcctcttctttcacgaataattataatcccatctctttagcaacttctgcaaaatgtggtaatgaattaacaattgtctcataagatacacagtatgcaattctaacatatccagggcatccaaatgatgacgcaggaaccataaggatattgtgtttcttggctgcctcacagaaaacagtttcatcttcaacaggtgactttacgaaaagatagaaagcaccctctggctttacacattcaaagcctaactttgtgagtccttcgtatattgcctttctgttcttgtcatatgcctcaagattaacctgtgcatcaacacattttgcaacaactctctgcataagtgaaggtgcattaacgaatcctaaaattcttgtagctacagaagctgctgacttaacatcttctgaatctgtaacctcatcaggaataacaagatatccgattcgctcacctggaagtgaaagcgacttactgtatgaataaccaacaatagtattgtcgtaatatttagtaagatatggaacatcaacaccgtcataagctaactctctgtatggttcatctgctattaagtaaatctctgttccgtactccttctgcttcttatccataatagcagccatcttctttatagtatcctctgaatatacaacacctgtcgggttattaggattattaacgataacagctcttgtcttaggtgttatctttgcttcaaactcgtcaagcttaggctggaaatccacagtattaggtgaaacaaccactaattttccgccaaaattgcttacataattcctgtattcaccaaagaatggagcaaatgtcataacctcttcgcccggattaagtaatgtcttgaatattgtattaagcccgcctgctgctccaacagtcattacaatattagtatggttaaaatgtgtcccgaatcttctattaagtgactcagctatagtctgtctcacatcctcatatcctgcattactcatatagccatgtataaatgttgattcttcattatctactatatccttaactgcttcattaacctctgcaggtgctggaacattagggttaccaagtgagaaatcatacacattttctgctccgtataacttggcaagtctgttgccttcctcgaacattgcacggattaccgaactgttttttactaaagaaaccattgaatcagctatcattgtttatatcctccaaaaaaaatatgactacattataatcaaaatcatttgattttacaactttcaatagatgtaatcatatgttattatttagattagtatttcattaattccagctgggggggaagaatattatgtctaaaactctttattcagtatacagatatattgttttaggtctgtttcttattattaacatatggctgtttctgctaagcattttcagtacgagcagactgacatctgatgcaagtgaacacacttattacacaggagaccatgcatggcttcatataatcatacttgtagttcttattgctgcagccttttatcttgtgagaaataacattttcaccagaattaacagttatctttccaataacgagaaaacatttatacgaatccgcaatatatgtcttattataattggtataagcggtgctgcctgggttctgcttacgcagagtaatgcaggcgctgaccagtattatgtgcttgatgctgcaagaggacttagaaacggtgattattcggcattccggtacaatggctatatagcaaaatacactaaccagattgggcttctgttcattgaatacattataggtttcatagttggtgactataattacttattctggcagcttcttaatgttgtgatgattgtattcacttacaagatgttttctgacatacttgggattttaaagcttccgcggattgcaagcctgtccactattatactgggaattctgtttttcccatggactctctacagcgtattcatatatggcaatgttgcaggattattctttgccacttccgctttcaaatacacaatgctttttattgacagccttaaagaatttaacagctttaagatttcatatattgttataagtgctgtttccatgatgttaagcgttatggttaagaataattatcttatattcatgattgcgctcataatctatacggttgcagaagcactaagacacagaaatatacagattattcttgttacatgtgccgtaattgcaggatttgcaattcaggccattgttccaaagcttgttatcgaaaagatttccggctgcaatcttggaagcggtgcttcaagctggacatggattgcaatgggacttcacccatctgatggcaatgtttatgcagacggctggtacagcgggcgtattgctgcattttacgagaataacgattacgatactaagaaagaagctgaggtttctaaagcagagattaaaggttatattgacacatataaaaacgaccacaaagcatttacatcatttctttcgaagaaagttgcctctcagtggaataaccctgaattccagtgtttctggataaccaatgtccgcagcagtgatattgagaaaagccctgttatctcggatattctttcactaaagggaagttcaacatttatcgcatttcttaatatgatgcagagtattattttatttggaagtatgctttatgctgtgaatacacttattgaaggtactttcgcaggtgctgctgtgcttcctcttactttcattggtggtttcatattccacctgttctgggaaggcaaatgccagtacacgcttccttatttcatgctgttacttcctcttagtattattggtttttacagcatggcaaagaaactgtcctcagtctcaaagaagtatttatacaaatgtagtgtatttgctgtaattcttttattcatagcaattatattcaaccgttttattattcttaatcaggataataagagttacaggcaatacagggaatacactattgaacagcaaaaactttaacgggaggtttttatgaacagacctgattgtttatatattgtaattccatgctacaatgaggaacaggttctgcctgttacttcaggcatgtttcttgatgaacttaaccatcttatcaaagccggcaaaatcagttctgacagcaggataatgtttgtcaatgatggaagttctgacagtacatgggatataattacggatttatcaaagaaggatgaacatttcatcggaataagccagagccgtaaccgcggacaccagagcagtgtacttgccggtcttatggaggcatcccagtatgctgatatgactatatctatagattgtgacggacaggatgacattcatgcaatggaagatatggttgacgcttaccacgatggctgtgatatcgtctatggtgtaagaaatgaccgttcaacagatacattttttaaaagaaacacagccaaaggcttctataaaatcatggcaaagcttggcgcagaaactgtatataaccatgccgattacaggcttttatcaaagcgtgtgattaatgaactggcacaattcaaggaaactaatctgtaccttcgtgggcttatcccgcttgtcggttttaaaagtacaagcgtatattattcaagaagcgaacgacttgccggaaagtcgcactatcctttcagcaaaatgcttaaccttgcattaaacggcataacaagccttagtgtaaaaccactccgtcttgttatgtcacttggtattatcgtttcaattctcagcttcatcggtgttatatgggctgtcgttgacaacctgctcggcaacacagtaaccggctgggcaagtacagtatgtatcgtatgcttcatgggcggaatacagcttatgtgcctcggggttatcggggaatacatcgggaagatatatatggaggtcaagaatagacctaggtttattatcagtgagaggacttatgagtgcaatgaatctaaaaatcagtaataaaagcgggggcatataatccaagactgatgtagattcattatacatgcctgatgagtgataccatagacttatttcctataaaacattcatatatgtgtttcttataggcagattatgggttcatctattaaaataaacgtgaattaattatgtaactacctataaaaagttgtttataaaacttcttataggtagttttttgctttcggaaatactctttgatgaaaccagtgggaattttgcctataaaaatgagattatgataagtcttataggacagaactaagagggaacattatttattagcatggttatgttgaaatatatgagatactacctataagtgagtatataacatatttcttataggacacagccactacgctatcaggacgggtacaatcagattaaataccaacaccatcagtatgtctgatagataaatgtttctataggctgccaatgttattattattcttatggctattattatcaccgtcattactgcacatggttttattttcttttttgttatgaatatccatagctgcatcctgtctattggcatgtttttgagcagttcttttgttgttattctttttctgttagtgctgtatgattcctgataagatttgtatttcatgaccatatatgtcacgccaagaatgtaaaacatgtacccaatcagaacaaccttcatgtcattgttcaaatcactgaaatctatcattttattaggtgcacatgctaatattcctgatattatgaagaaaaatatggccagaaacttctctcctacattatccggaaaccatgtattttcttctttaaagaacttttctaatttttcctgctgtttgatatctgttatgatagtcattttctcctctttcctgtgctgttctcacactgtgcattcaatactttcgctgaactttcccagtctgccgccctccataactgccacataatccgtattcttcataatctctgtcatgtcatgtgttatcataatcacacagcattcctgtgctataagttctcttaacatgtcaaataattctatcttaaacactgcatccatgcctgctgttgcttcatcaagaagatacagcctgctgtgatgtgctattgcaaacgcaagctggaacttcatacgctcacctcttgacatacgccacaatgtcgttgcagtgccgacattcatctttttcatacattcattaaacagttccacatcaaaatcatcatacacaagtcccagtatatcagcattctgctttccagtacggttctcgaagaatacattatcctctgacaccagcccggtgatttccattgcttttgcatgatttccagcaagctcgtaaccggacagctttatgctgcctgtatatctttttttccctgttaaaatgtagttaaacaatgtcgtttttcctgctccgttctttcctgtgaccgcatatatgtagccgttttccagtgtcatactgacattcttaagcttaaatccaaagccttttcctgttacatctttaaactccaatgcaatattgtccatttctatttctcctcatacaaagtgcgaatcatatccactaaatcatcacaggaaagccctgcattttttgcttcatatatgatttcctgagttctcttttctatcatcataagctgcttttctttcagataatctgtgttgtattcacacacatagaatccttttcctgcaaccgagcggataagcccctctttttcaagttcttcataagccctcttggttgttatcacactaacctgcaggtctgctgccaatgcccttattgaaggaagtgcctcgccggatttcagttctccggttattatcgcattcttaagctgcattattatctgctcgtatattgcaagcgttccctgtggcaggatatttatattaatgctcataaaaccacctcttcataaactgccgctgacttaagctttctttttacctgccttgcataacctatgcatactggaaactctataagcaccattattgaatataaaaaacgttcttcaataatcggcgtaaatgaactcattaatatatcaaactgccagcagtcagtaattgtacatataattataagtgccataacatatgataacaatccatcttttttgccatatggaagcagcgtgctgattataaatgcatttatagtaatatatataaatacagacgcactgaatcttactgccatcatcataaatatattgccaatcgtcagtatcagcatgtgtactgccactctgaagatataagagtttctcaccaacttttcacgctcattggttgtaagcgggcatacataatacattgttcttaattcagcagggtgtgtgaatattgaaagacagcagatagcaagagatataaaataccctgaagcaattactaattgagcccatccggctgttttaataatctgtgccacaaatataagctgtaccgctaaaaaattaaatattgctgaatttccgtgttcatatgatgccttgaaattctcccaatgccatccatatatataatccctcattaagtatttcatattacactttcacctcttttactgtaatgatacatgaattcttccagtgtcggaactgttaccgtaagtgcaccatcatactttgaatatccatgattgactacaagtgctttagttccgtatttcctgtcctctacatgtatgatgtcttcctgcttaagaagtttcactttataggtttctcctgatattatcctgtacttatccctaaagctttctatatctcctgaatatacaagttctcccttatcaagatatataagataatctgcaatcctgtctaattcatccagtatatgtgatgcaataatcacacttttcttaccgctttccataaactgcataatcacattcaggaaatcctgtttaaaatcaggatcaaaattagctgtcggttcatcaagtatcagatactttgggtctgttgataatgcaaatgcaaactgtgcctttatcttctgtcccttcgataattttccaaactttatctttctatcaagtccaaaccgttcaagatactccatgtagatgctttcgtcatatctgctataaaatctgccataacatcttccattctctaaaagtgaaagttctgaattcataagttcattgactggtactattcctgtaatatcacggattctcttctcgcattccgcttcctgataattcaatccatcaattacaaccgttccctcgtccggtctgcaaagccccagtatcatcttaataagtgttgtctttcccgacgcattctgccccacaagtgcacatatgtatccatcaggaatctctattgagatgtccttcagtctgaaacttcctaatctcttattaactccactcaaagaaatcattcttctgcctccccaaaacacagtcttacacataacagctatacacctgatatactatttttgtgcatacactgtatatatacatatatacagtgtatgcacgcatttgtcaagcaattcttgctttatttatgtgtttatttccgcttccgtcctataagaatcattatttgaactaatttataggagtttttctatcaatttcagcaaaaattcttcttcaaagcaaaaaaatacctataagaagtcaattcaaagactccttataggtattttaagcattatttttatctatcttaatagtcaagtttgtaattcacctataaatcacacactttacatcattttataggtaagcgctgaggcattccagacttatgcaaccctctgacgcatcatagcattcagcactcatgcagcaagaatcactacttcacgctatcttataagctttcatcattccacaccatcaataaatctggcaacaaagcttaatgctgctccaagccctgattttctgccaccgccatctgatattcttaaataatccgcatcagtatcaaaggaataatcattaacaagacgttctttaatactattctcatattgcttaagatatggtgcaactgttccgccaagaacaatatcacagtccatcattgtgtatatgttattaattccaagagccagattgtccatatattcatctaacacattggaattattcttatttccctgcgctgccagttcaaagaaattgtcaagtgtcatatcaagctctgatgataataccttttctgaaacatatgcttcaaaacagcccttcttaccacacaggcactgctttcctccagggtgaataaccatatgtccgaattcgccaccacggttatgaacaccatttctgattgcggaagcgttaatatatgcacctccgacaccttcaccaagcataatatatattttttcatcttcaggctttccattaaaccagtggtctgcgtatgcctctgccctcgcatcgttcattactacaaccggataatcaatagctgatataagctttgtaaaatcatagttcttagcttttaatggtggtgctgagataagaatctgcttttcatcatcaagtattcccggaactgtaacgccaactcccagaatgtcatctgcgtctgctccaacataatccgctgcatgtcttaccgcatctgtaagcttctcaatatatgcactgctcttactaaaatgtactttaacagccatactgtatataatctggcctttaagcccgactacatctacattaatatagtcagctttgatattcacgctgatggcttttcttgcgttattattaatagtaattgcctgtgcccttcttccacccgttgaagtgaaattgccaacatattctataagttcatcttccatgagcatcttaagattctgattgaccgtcggcagagacagacctaactggttcgctatctcctgccttgatatcttatctgaattatatatcagtctgaatatacggtttttattaagtttttttacatccgtgtttgttagtttctgtgatgaatccatccattacctctcgcttaatcccggttaacctgtatgtcaattacattactcgccaaatacagcgatataatctttcttgaacttctcaattcctgcatctgtaagcggatgatgaaccatctgctcaattaccttatatggtactgttgcaatatcagctcctgcaagtgcgcagtctgtaatatgtattggatttcttacacttgcacagataatctctgtcttaagatcatagttagcaaatatatctgcaatatcctgaataagattaatgcccggctgtgatatatcatcaagtcttccaaggaaaggggacacatatgctgcacctgctcttgcagctaaaagcgcctgattagctgagaatattaatgtaacattaacctttattccctcagatgataacaccttagtagccttaagaccttcaactgtcataggaatcttaacaaccatgttagggtggattgctgcaatctctcttccctctttgatcattccttctgcatcctcagtagtagccttaacctcgccacttataggtccgtcaacaatagaagtaatctccttgataacttccttgaaatctcttccttctttggcgataagggatggattagtggttactccacagataactcccatgtcattagccttacggatatcctcaacatttgcagtatcaataaaaaacttcataataaaattctccttgttaatcactcattaattgttctgaatacattcttcattgcaggatagatacatctgaacttattgtacttatcctcgtatctttctattatcttctcgtccggccttattgtctttcgtactttaacgagagcattagacgcatcttcaacgcaattatactccccggctgcaaccatggcaagcattgccgcacccatagcaggaccttcctctgactctaacagttccacaggaattccaagtacattagccataatcttgcaccacagttctgacttagcgccaccaccgcacatacgggttgactccaccttaatactgagactcttagcaacctcgaagcagtcccttattgcaaatgcaacgccttccagaactgcctgtgtcatatccttacgctcagtatccattgtcattcctgtaaatgtgcctcttgcaaattcgtcattatgcggtgatctctcacccatcagatatggaaggaaatacacattattattgccaaggtcatcatctgttatctgcgactgttcacctgcataatcattagttccgagtatcttgtccatccaccatccattagctgaagctgcacttaatatacagcccataagatgatatttcccatccgcatgtgcgaaagaatgaagtgcattattggaatccactccgaattccttgcttgaaatgaatattgtaccgcttgttcccaaagaaacattacaatgtccgtcaccgacagtaccagtgcctactgcagcagctgcattatcacctgcaccggctgcaacaattacttcacatcctattccaagctcatcagcaatatccttctttacagtaccaacgcactcactactttcaaagatgcgtggcatctgtgcttctgtcacgccacatatatcaagcatctgacgcgaccaacgcctgttcttcacatcaaacagcaacatgcccgatgcatctgaaacatctgtacaatgcacacctgtaagacgatacgcaatataatcctttggaagcattatcttgtctatcttagcaaaattatccggttcattctccttcacccacaatatcttaggtgctgtaaaacctgcaaatgcaatatttgctgtatattctgataacttatccctgcctatcacttcattcaggtactcacactgcttcgttgttcttccgtcattccataaaatagccggtctaataacctcatcattcttatcaagaataacaagtccatgcatctgtccaccaaagctgataccaccaactgttgattcatcctgtccgtcaagcagctccttcatgccttctatacaggcatcataccagtcataaggattctgctctgaccagccggccttagggtaatcaatcggataactcttagacacatttgcaataatatgtcctgctgtgtccataagaacaagcttgaccgacgaagttccaaggtcaattcctatataattcatgccagactcctttccacaatcatatatctataaccgcacctgtttatgcaaatgggttctcgctcttgtaaagcatgcccttaggctggttgaatgacacatcctcaacaccgatatacttaaacacatcaaaaagtgtctttccaaaatgtccgaatgcaactgcaccatgatgtgggaagttaccttcgataagcacatgtctgtagaatcttcccatctctggaatagcaaatatacctattgcaccaaatgaacgtgttcttaccggaagaacttcaccctgtgctatgtaagcggaaagcttgttatctgatgaattctggagtctgaaaaatgtgatatctcccggaacgatatctccttcaagtgtaccattagtaacttcttcaggaagtgaacgtgccataatcatctggtttctcatctcgcagaatgacaatttgcttgatgcagtgttgccacaatggaatcccataaatgtatccttctgtgtatatgcatatctgcctgcgatatcctcattgtagatatctgctggaactgtattattaatatcaagaagtgtaacaatatcgtcacttacaacttctccgataaattcactcaatgcaccatatatatcaacttcgcatgatacaggtattcctcttgaagtaagtcttgagttgacataacaaggaacacatccgaactgtgtctggaatgccggccagcatttacctgccactgcaacatattttcttgaacccttatgtgattcaacccagtcagttaatgtgagctcatactgcgcaagtctgcttaaaatttcaggctttttatttcctgtaccaagctctttttccatatctcttacaacatcaggaattctttcatctcctgcatgtttattaaagctctcgaacaggtcaagctctgaattttcctcaatctcaacaccaagattatatagacctgcaattggtgcattacatgcaaggaaattgttaggtcttggaccaaaactgataatcttaagattgcttaatgcgtataccgcctttgctacaggtatgaattcatgaatcatatctgcacattcttctgctgttccaacaggatattctggaatatatgctttaactcctcgaagcttaagattatagcttgcattaagcattccacaataagcatcgcctcgtccctgaacaagaccaccattagctgatgtctcctctgctgccgcaatgaacatcttaggtccgttgaaattttttgcaagcattgtctcagcaatctcaggtccgaaattaccaagatatacacaaagtgcattacatcctgcattcttaatatcctcaagtgcctgcatcatatgtatctcactctcaacgatacataccggacattcatagatatcccccttgccatactttgcttcatatgcctttacaagattctgtcttcttgtaactgaaagtgattctggaaagcagtctcttgaaactgcaacaataccgattttcataactggtgtattattcataacttatctcctttaacctatactgttatattctctccccttaagccgttaaatgctccatctatatgagcatcttcatgggctatcagccatttattagatgccgcaagcaacttatcttctgctgttgcatgagtattaactacatcaagattagttccctttggaagtacaactacgcacttaaagccctgtccatccacaccacacggtgcataatgaagagttgttgcatacacctcaatggctgttccctcaggcacaaagaatccttcaaccttagatgtatcatatgtaaaatcgtcttccacatcttctctgctgccaagcagcagaatcatatctgttgccgcaatattaacttctgaacttctgtgatattccagtgcattaagtttctggttatgtccattacaataccctgtctgtacaggacatccaccatatatactctcttccattaccttatgaatctttgtattttcaagcttttcatcacctgcaacatatacaacatcttcaggcatatcatacgaatccataagtttcactatttcactggtatcaatatcagcaataactctgccatatttcttaaatccagcatccaatacactctgcaaaaacactacctcctttttcaactcatgttaaacttttataaagtatctttctaaaagttattctatcactgttttatttctaattcaataaaaaaatctccgattatcaaaaatgtatcctgaaagatacactcccaataaccggagattaatattaatatgttaaattgccaatcttacaatataatctttgataatgcatcaattataattccccatgctacaccactcacataaagaatcgcaagaattctaaaattatccttcatatcatcgttctctctgaacagcacaagaatacctactcccgaaccggcaagcagtcctgccataagagagccaagtccaagtacgccttcaatataaagctgtgttaatactactgatgatgcacagttaggaataagacctataattcccgctatcaatggtccaataacaggcttattaagtataagatttcccaaagtctcttcaccaacaaagtgaattaaagtattaagtgcaaaagatataacaacaataaatgcaaatatagttattgtatgtcttaacgctgacttaaatatgcttgtctcacagccacagtggtcatgatcacatacatgtccaatcttttctaccatattataacttttcttgcttcttctcactatcagatcaattacaacacccattataagacctataaaaaccttaatgagtataagcttgacaagcactaatacatctacctgttctgataaaaatactggtatcatctcgtctgaagtagacataaagatggcaataagcgttcccatagtaattactttacctgcatacaggttagatgccgctgtagaaaaaccacactgtggaacagctccaagtaaagctcctataacaggcccagccttgccagaatccttaacaaacttcttcgtcctggcacttgtcttatgttcaagatactccatagcaagataagtcagaaaaagaaacggcaacagtttaacactatcaatgatagtatcaaataccacatccatcatgatatacaatcgtcctttcttaaaaacagtcacatagttacatattcattatgccttggcaaaaagcttcttataaggttcttctcccgaaaacacctttcttgctttctctgatcttttcataataagctttgtaacaaaataacctattactccatacagtgatccaagtaacagactcgcaagtacatctgttggataatgaactgtaagatataatcttgaaactgcaatcagagctgcaagtataactgcgggaattcctttctttctgtcccacaatataatagctaatgccgctgcaaaagaagctgatgtatgtcctgatgggaaagaccagtccttaatgccattaaagattccataaagattctcaaatgtcggatctgcattgaatggtcttattcttgctgacagatttttcataattccgttacacataataagtgacagaataagtccaattgccatactaagtcctaactttctgtctttcttaaataccggtataaataagaacgccgcacataataaaatccagaatattccagcattcccaagacaggttatagcatacataaccggatctgttacaggattatgtaatgattcaaaccagtgtaaaatctgaagttccataatagtctccttatcatatcattctagtacgctccttttcaggcacaccagaatattctatgatataagaaaacatttgtcaattaaaggaatacgttttttcatagtaacactttcctgttcttccaccaaatggatattcatattcttctgtaactccaatctgaaacaaccctctgtctaaatctgaatctataagtttaacagtaacattaccatctgacgcaactctttcacttaaaaccacacaaaattcttccatcagatcagtcagtatctgttgtcttttcccagcatcatatgttgtaaaatatttatcagcatatacatcacccatcctgtcaaatgcaaaatccattgcaccgtcaagacttctgttgacttcatctcttctaatattgtttcctgttatcgacgcatgtatcatgactattaacgctataacaacaataataccactacatgtaataactcctctcaaatatcttcagcttacaaagtaacgtgcaagtcctttatatgtatgttgcgaagaataaccaaacatagccgcagacagcggatattccagtgtgtattctatatattcataatcacctgccctgcttacgtctccatatgtaagcctcataccccctttctgaactgacctggctaacacataaagcttcttatctctagcttcctctgataattcactatcaggaatatccccacaatatgcttcaatataattctcaatatactggcttatctctcctgcatcagaaactctctgattaatccttatgaaatcaatagaaaagaaacataccaatgcaaatataacaagataaactgatgtctcaattatccccttcattaataccccctttatctgctatccaaggcatgaacctatcacacctaaaagtatatttctgtacgcagacatagacattccaatcattgtcatggcaaccaccactgcacacattcctattactgcttctccgtatgtattaataacatccttcatattcttatcacccctgtaaagatatttccaaaaatattaatcattgaataagatacaatcagtccaattatcactcctgcatattcatcaataatatgattcatataatatacacctccaattataagtacatattaacaactaacatcatatcaaccgccatcttaaatgccacaaaaaaagttggtatatactcagaaaatctcatcatgcttgtactgtcaagatatctggcagcctctgccttatctgataattcataatttcttcttacgagagcattaatcgtctgattcatgctgtccctgtctagatctcctattgaatacaacattctgactgccgattggatatccatcacatcaaattcacttaagaaactataatatggcatgatatcagatggattgagttcaatctcatatataaactttcctaaagattctttcatgataacaggacagctatcataagtatcttcaactgctgacaataatggtttattttcaagattaactgctaagtctcttagccattctgtaaaaccacaatataagtcattcttaattcttcctgctgaaccttttctctgtgtaaatggcgttattataaacagaaccataactgcagcaacacatatcgccgctatctttaactgtactaatacgagaattatcactgtaagcagcataatcccccataacggaatcatctttaaagtaatcttctttgcttctgacttaaatacattattataatcacgcattatctgcttatctgttctggtttctcctatccagtcacaaccatagtgcttacgggtatatatgtaaaacagcatacacagaacaacaaacacaatggaaacgcactgatatgccagtgtgtctgttatgctaagcggctctttcgaaaacatattaagagtactgcacataacggtagtaagcattgcaagcaccatgcttatcattattcctatagtaatatcccgctttatctttcttatctccgactgatacttatatacattattaacccatctgtcaaaatcctccagaagcacttccattgctcctgtgtatcgtccacccttttcttctacactgactaagaacttatgaagtgtccgtattcttgaacaatcatattcttcttcaacaatcttcaatgcatcttcatatactctttcccccattccatattgaagttcttcaattgcccgtgaaagacatctcttgagtcttccgctgctgattgcatacgcatcctgaagtgcaatattaaccttcggattcctgataaacgagtatgtcatctggtgaagatacacatccacatctgcaaatcttgacgctttacttctttccataaaataattccttactagtccgggaatcataattacagccagaatcataacaaataacgctgcgatataattaattctgtacaacagacatgcaccatatacagcaactcctgcaagcatggttgataaaacaaatcttcttacagacataacgccattcagatctgcaatgtcctccattaactgctttacagataaatatcttaatatcttcttcaattgtgcctccatatatacggatcatctattccgtatttaataaacttatccataatatcctgtggaatatcactatccagaaattccccatcttcatatataacagtacatgtattctctccctgattcctgcttaaaaaacctacctggctgatatgtcttctttcaaatctgtcgcaatcaacaagcagcacaagatcaatatacttatatatactgttaataaatctgtctgacgattctccattacccagcatagaatacattctgtccggcatatcccttatatcatccagatgcatagtcgtcatacaataagctcccgtagataaactgttaagaagctccataacttctggtcctcttgattctgaaagaagaacccagtcaatgttatgtcgtaaacctgctcttataatatcctgatatgtaatcttagaatccacaaaaaactcaacacacttgctatgtggattaatctgcctgtaatgtatctcctgattatcctcataaacaccaaccttttcttctgccggaataaatgtagccagatacttaagaagttctgtctttcctgcatgaggctgtccaccaattacagttgaaagatgagccatcacacaattctcaagcaatgtaataatactctcaggagcataatcagacttaacaaggtcactatgcccaaatctaagtttccttggaatctttcttatagccatactctttcttccacaccttgattcgtgccatattgagattcttaaagattcagtattagcctccaatatcgggtgcattctgttaaaagatgcacccataatattagcaagtcttatagacagattatccatatacctgtcactaagctctttcatggaaatatagcagcctcttcccaactgtgttatccaaagattatatccatcccactcgatatcagttacagtatcatcagatatctcatccttaatctctgaaaagatatcctctttattattctctatcagctcctgaagctgttctttctccatatacattcctcacattactgattaggtctgctcgcatcaatagcatcatatatatgctccttatacgaaatgtcactaacagcacctttagttctgtctgaaacaatagtaacaactgctgctgtaagcaatactgctgctgtaagcaatactgctgcaagtacccctgcaagtgctataacaacctttccataatgctcaataatatcatgcatatacaaatcctcctcttgattaaattatttaaaaagtactttttatattgttgatattatcacatatttaaaagtttgtaaagtataaaaatatataaatttcaaaaaaagactttcgcatcagaatataatgcaaaagtcttaaaatactatttcttattaagttctattgtattgtttccatcgcttaaagaaagtacatttttcttgattgaatatgtatactcatctgtctcttctgtcccaaggaaactgattgttatgctcagctttccatcttttgcttcatacgaagtaattgaaacgcttatctctcctatctgctggattcctgttccatcatcattgaaagtgtaagtataatcatctccttcccatgttccaacaaccgttgcttccttaccacagcctgcaaatactgcaatcactgtaataagtacagctaatatgcttactctcttaagtaatttcataaaacctccattataaattaattgtttttacagcctctacaactttggtaaattccataccatgagatgcctttataagtatattatcacctgttttcagaatatgtccaatacattttaacatatcatctcttgtttcaaaatcatgtacttcacaaccatgtgcattgtaattagtgtcaatatatgcccttgttccttccgcaatctgtgcagcaagatcgcctgcggttataagtacatcaatatccttagttccaagatacatcccaacatcgtaatgcatctgtttctcgttatcaccaagctcaaacatacttccaagaatagcaacttttctaccaatagcagtgtcaagaacatcaagagatgccttcattgaaactggattagcattgtagcagtcatcaattattgtaaatccattttccttaataatattgtttcgtccggcaattgtttttaaattcttcaccccacgctcaatctcaatagatgaaagtccaagcacagaaccaacaagtgctgctgccatcgcattatataccatataatgtcccggtacaggtacagtcaggtcaaatgttgaatagttatctgatgttttgattccatgaattgtaaagctggttccatcaagtccaagactcttgatattatctgcatataccccgtctttgttgcttattccgaacacaagcggtcgcttgccgtgtacctggcttattgttgataatttgtcatcatctccgttaacaataacaattccatccggattcatatgattaaatatctctgtcttagccttaagaattccatctcttgttccaagattctcaagatggcaaaaaccgatattagtaataacacatatgtcaggctgtgcaatcttagataatctgtccatctcaccaaaatcactgattcccatctcaagaacagcaacttcatcatcttctgtcagtctgaaaacagtaagtggaagcccaatctcattattgaaattaccaagtgtctttaacaccctgtatttttcagataaaacagagcttattgtttccttagtacttgttttaccaacacttcctgtgattcctacaaccttgacatccagattatttctgtaaagaagtgcaagatcctttaatgcctgaagacttgattcaacctgtatatacgaacgttcttgatctggcagctccttttcagaaataacgcatgcagcgcccttctcaaagcattgtcctataaaatcatggccatcacttctttcccctttaatagcaataaaaagcccgccctcagctacctttctgctgtcaatcgtaatggcagtaatctctttgtcataatcttctccattgccatgatatatgccgttaacagcttgtgtcatggctcttaaggtcattcccttcataacacaatatcctcaattcttttcttaggcacatgatgtacctgattctcatctctgtaatacttgatatctccatccgcaggaatatcctcaagcaccacttcttctttaggatagccaaatgcaatgacatacacaatctttaattcagacggtatatttagctgtgtctttaactcatctcttttaacattgccaaaaaagcatccgccaaatccggcttctgtagctgccagaagcattgtctgtccgacaattcccgcatcaacttcatcattgacattcgcaggacatgttataacaatatatcctgtcggcttctcaccttcagatgggccatcccagtcctttaaatatccggcaaatcctaatagtctgaaaactttctcattctcttcctcatcacacacaattctatacttaaatggctgtctgttagctgctgacggagtaagtcttgcagtctcaacaagttccataagctgctgccttgtcagcttcttttcctgataaaatcttctgtatgatctgtttttcttaacaagttccttaatcataacataactaacctcgttttataaaaatgtattattatacatttacatttcttctattcatactttgcaagagatatctcgataatcttctctgtaagttcatcatacgatatacctactactgctgcctcctgaggaataaggcttgtgtcagtcattcctggaagtgtattaatctcaagacagaatatattattattcttatcaagaagttcatcaactcttgcgtatgttgttacgcctgctgcctggcagcatttttctgcccagaactgcatctggcttgcaatatcttctggaatattggcagggcatgtctctttggtagagccagccttgtacttattcttgtaatcatagaagccttcaagcggttcaatctcaattactggaagtgcctttccatcaagcactgcaactgagaattctcttccatcaacaaactcttcaacaagtacagtatcttcataagaaaatgcttcatcaagtgcatcttcaaactctttctcgttatgtgctatcgaaacaccaacgcttgaaccaccacaacaaggcttaacaacacatgggaatggaacatactcaatcttatgtcctttatgtaatgtaacacccttaggcataggaattccctctggtacaagaaccttttttgcaagttccttgctcattgatatagcactgcttaaataatctgtacctgtatatctgattccaagcagatcaaatgtagcctggaccttaccatcttcaccattgcttccatgaagtcccatgaataccatatctgcttctttacacaattctaatacattacgtccgaaaaagctttctcttgcctctgttcttctcttaacctctgccggaatgtccgctgttttcttctttaaattgtcagacagttctcccaaatcattcttttctgtgaaaaatgtcttaacctcactgtcatcaacacctaagaagatatcaagcatatttgcttcatgtccgtttcttctaagactctcgcatactctgtatcctgtgactaatgaaacgtctctttctgtacttgttccacctgctaaaactactattctcataatttctcctttatccctgaacttttccacaatatccacatagttattcacatttttttgttaattgtaaattttttgtaaaattgtcagataattgtaatatatttatataatccacatattcttatgcagaatctgtgcaaattattacggtcttaaatggcttccttcatactttgtatgtgcctgtaaaacctttcttaaagaatcaattcttccagaaagttcgccttctggaacaactatctccagtgattcagccataatatctatcattggatttgtgaatctgcttttgtatcttataaggacatcaagcttttcctcatatcctctcgcatctaaaaacttatccaggacgctgtcccctgcagcaacctgctgctctggctgggccagtgagttatccacactgtcctcttttaatgtgtatgcttcatcaattctattgtctgaattaactcttactgcctgtgaattgtcagactgtaaattgtcagatatctcctgcatcgtcaacggatctacctgctcaaatctatatttctgtgctacatccggatattttacatgatccacttcactcatgaacatatcatatggtcttacatacacagcatattcaccatacatagcctgatataccaccattttctctttggtttctgaatgatatgcaacacactttacctggtaaagcttattcttaaaatgcttataaaatccgcctggtactaactgtctttccatcagtaaacctccctccaaaaatatactgttattttatcgcacaatgccgtctcttacaacattttttaaacactttgccaaatgttttacactttaataagttgtctgagtatggtagaatatatttacattttataagaggagcttactatgaaacagatagatttacatgttcattccacatgctctgacggaactgattctcctgctgttctggttgataaggcagtcgataagggacttgctgcatttgctcttaccgaccatgacactaccatgggagttaaggaagctcttttagcatgtgaaaatgttaataacaaaggccacgaacttgaagttattcccggagttgagataagtactaattatgataatactgagatacatgttgtcgggctttttatagattataacgacaatgaattcaattcattccttaataagcagttaagttcaagagatgaaagaaataagctggtatgtgaacgcttccagaatataggaattaatattacatatgaagatatgctaaaaacctatggcgatgcggtaattacaagagcacattttgcagacagacttgttgcaattggagctgttggtgatagaaatgaagcatttgacagatatttaggtcagggaaagccttgttttgtgccaagagccaaagttgaccctgcagaagctattgaacgtattcaccaagccggcggtattgcaatcttagctcacccggttctatatcatcttggcaatgcccagatgaacaaattgcttgaccatatgtgctctgccggacttgatggaattgaagccatatattcaacctacaagatgggtgatgaattatcaatcagacggattgcttctgaaagaaatctgctgatatccggcggctctgattatcatggaaagaacaagcctcatatacagcttggaaccggcatgggacatttattcgttccttatgagctgattgataagatgagagattccatgccaatcaccaacacacagaaggagacttacgatgaataataaaattccaaaagctatacagctctttttaactttcataaaaataggtgcatttacttttggaggcggttatgctatgttaccactgattcaaaaagaaattgttgagaagaaacattggataactgataatgatattcttgaaatagtggctatctccgagtcaactcccggaccaattgcaattaatgcggctacttttgttggctttcgtatctgtggtttttggggtgcactatttgcaacacttggagttgtgataccatcctacctaattattcttattatatcttttgtacttaaagaattccaaagcataaaaatcatacaatatgcctttaatggtatcagagctggtgtacttgctctgattatcaaagctctctggtcaatgtatattcaatgtcctaagaatgttatttcctatataattatggcatgttcttttgtttttactgccttacttaatgtaaatgtgcttattgtaattatcagctgtgcaatattaggtttagtaacatctattaccacattaaggaggaaatgttaatgatttatcttgagcttttttatattttcttaaaaatcggtgcatttacctttggcggtggttatgctatgttaccattgattcaggatgaagttattgctcataattggatagattcacagtcacttattgattttatagcagttagcgaaagtacacccggaccatttgctgtaaatatagcaacatatgtaggagcagaggttggcggtattttcggttctttttgtgcaacactcggagtgatactcccatcctttattatcattcttattgttgcaaaatgttttattcaatttcaaaaaagtatagtcataaagggatgtatgtcaggattaaaacctgctgtagttggtttgattggttctgctgtaatttcgatgagttcaaccgttttcataccagatgggtttaatactactgtttttactgatatttgtttttatacaacattaattatatttctgatatccgtagttttagcattcaaaaaaataaacccaattttaattatatgcttatccgcaatactcggaatagtttgcggatacatataattaattataacaaaacatcataaaagactcagattaacggtcctggatagtttaaattaatgcctgtatcatttttcatcaacaacctgaaagataaagaatttcagataatagctctcctgcgcctcccacagtattgggtggtcaggtgactgtgtcctgaactcgacctgacggagtcttttatgtacagccttagcagcttccttaatagtcttggtaagaagctcctgtgtcatgaagtgtgagcatgaacagcttgcaagataaccgccgtctttgacaagtttaagtcccttcatattgatttccctgtagcccttaattgcgttctttgtagcttccctcgatttggtaaatgccggcgggtcaagtattacaacgtcatatttctcacctgcttcgttaagctttggcagctcgtccaatacatttgcacatttaaaatgtactgtatcctcaagtccgttaagcttggcattggctctcgcctgttcaacagcatattctgatatatcaagtccagtaacttccttagcacctgcaattcctgcatttaatgcaaatgtacccatatgggtgaaacagtctaataccctcttgtccttgcacagcttctgcattgcaagtctgttgtacttctgatcaagaaagaacccggttttctgtccattcacaacatctatcatgtagtggacaccattctcaactatctcaacattagtgtcaaattcatcaccaataaagccctttactctctccatcccttcaagagtacggactttggcatcgcttctttcatatactccacggatatcaatgccttttttatgaaggatttccttcacttttccaataataagtgacttaaatctgtcaatccctaaagcaagtgattccacaacaagcacatctgagtacttatctataacaagccccggcagaaaatctgcctctccaaatataagacggcaggcagaggtatctactgtgtcaaatctgtactcaaccgcagcccttactctctcctcaataaatgcctcatcaacaacatcagtgtgtcttgcaagcattcttactgtaatcttggattttctgttaataaatccgattcccatgaaataatcatcaaaatcgagcacctcaacaagatgtccgtcaataattccgtcagacatccattcaatttcattatcatatatccaggctccacctgcctttaaggttctcccttctccttttcttaatcgtatctttccacatacactgaataaatcttccattctgttccttcctgtcagatatttctgacatttatcataattcttcataatatattaatccgttgacggattaccaagaaaataaaacatacatactcctgcaaccgtaataagaagcgacacaagcttaatccatgaaaatgtagtcttctcacttccaaacaatccaaaaagtcctagcagatatgaaacaattatctgtgcagctacaatcgtaacctcagctttcgcaattccaagaccacttatactttttataactgtaaatgttataaatgcacctatcacacctccaagaagtgtaatcttgttatcaaccttaaacaacttcattatatctggtcttccgtcaattacccacataatcgcacaagtcgccagtgctgtcaactgcacaaacattgccgtaacccacacactgctcgctttcgtaacatttgtattaaatgcgccctgtaaactcataagtgcacctgatattattgcaatcaaaaatcctgccattaactaacctccccattaatctgcataggataattattagttaataacaggatatttattcataatgttatttaatactctgcgtactgttttcattattgtttttagttgttttttctattgttgttgcaaatgtactgtaagctgtatcaacatttccaccatcatatacctgatgaagcataatctcatatctcatatacacttctcctactccgatatatttagcttttacaacagagtcagaataaatctggtgtaacttctggtagctttctgctctcttaacctttaaatccgcccttgcacagcttttcttagccatgttcccaagataatctgcataatcataagaaattgctcttgcaacagccttggatgcatctacattcttagtgtacggattaactactgccatcgtagtaacagacattgccttagaatcaaggtcatctcccattgaaggatactcacatattccataatctacatctgtaacattaatctctgcaagactgtctgcatctagcaccgtatagagcatatttccagtagaaaacagatccgcacattctttaagacttactgtatttctgtcaataccaaatgcatcttttaactgagcgtacttagtaagaaccttcttaatcttttcctcattaagagatacctcagccctgttctctgcattaactccgcctatattaatataggctcctgctgctgcataattaaggaacattgaatcaggatcccattcaaacaccattgaaacatcctgattctcatctgtaatctgataattatcacttatattacgaatctggtctatagtatcaactgcttctgcatatttcttattatatacaagaaatgaagtgttgaacgacactgggtaaccatataacttaccaccatacgaacatgcagtcattgcagccttaccatacacattctcattatagacttcaggatacatatcattctcagaggtaagacctgaaagataagccttctccatctcttcagatgtcagaaaatatatatcacacgcattgtcgtttctgaccgattcgtcatatatataagtaatatatgaatcagcctcaatatatacaggattaatagttaccagttcattagatttcttaaattgtctggcaacgaattcaagataagactcatatgcactgtcattataccagacattaactgtaataggtccactaagattaagcttcttcgcagcctgtgtcctgtcatctttattaccacagcctgcaaagactgtcagcatggtaacaatcagcatcatactgataaatcttcttaatttcataaagtaaactcctgattctagaaggatttcttaagcttagctatgcattcatctacatctgccttagtaattacaagtggtggaacaaatcttataacattagttcctgctgagaacagaataagtccgttatcaagtgctctcgcaattacgtccttaggattaactgataactcaagtccctgcataagacccattcctcgtctctcgacaacaacatctattgtctcaacaagctcatcaagcttttcttcaaagtaagcagatacttccttgacattatctaatacatgctgcttctcaaaaagttcgaacaccttggttgctgctgcacatgcaagtggattaccaccgtatgttgttccatggtctcctggaaccaatgccttcgcaacttcctctgtcgccgcaaatgcacctacaggaactccacagccaagagccttggcaactgtaaggatatcaggcttaacgccatactgctggaatgcaaacatacttcctgttcttcccattccgcactgaatctcatcaagtataagaaggattcccttctcatcgcataactttcttacaccttcaataaattctttagtagcaggataaattcctccttcaccctgtactgtctcaaatattatagcacaagttttgtcattaacaagttcctttacactgttaaggtcgttatactgtgcaaacttaattcccggtatcataggtccgaatgcttcctgataatgcttattaccagttactgcaagtgctcccatacttcttccatggaatgaatgctgcattgcaataatctctgcatcagcctttccgttcttgacataataatatttctttgcaagcttaactgcaccttcaatagcctctgttccactgttagtaaagaatactctgtccattcctgaagcctttgtaagtgcagttgcagcctctacagccggttcattatagaaataattagatgtgtgtataagcttatcaatctgtgcctttaatgcatcgttatattctttattgttataaccaagtgcaaatactgctatacctgctccaaaatcaagatattctttaccatctgtatcgtaaagtcttactccgtcgcccttatcaagtactatctggtaacggttgtatgtatgaatcagcttctcttctgctgtttctataatctgctgtgtattcatgattactctcactttcctattcttatgagcacacattttcacatgggccaatataatattataacctcaacgcttacggttcgcaattatttatctgaatcaaagaatttttctgcatcatctgaaagaatagctgtaccaacacccttgttagtaaatatttcaagaagaaggcagtgtggaattcttccatcaagaatatgtactcttgatacaccatgctcaatagcatctatacagttattaagcttaggaagcataccgccgccgattgttccgctctctaaaagtgttctcgcctctgaagtagaaagctcagatataagtgaatccttatcgtcaaaatccttatatacaccttcgatatctgttaagaatgcaagcttttcagcactgacagctcttgcgatggcacatgctgcatcatcagcattaatattatatgcatggaaatcatcatcatatccgataggacatattaccggtaagaaatcgtccttaagcaatgaatcaagaagtgttgtatcaacatctgttacttctccaacatatcctatgtcctcacccttagaatacttcttctcaacctttaacatgccgccatccttaccactgataccgcatgccttaactccaagctgctcaatcattgacacaagactcttattaaccttgttaagaaccatctcagcaatctccattgttggctcgtctgtaactcttaatccattcttgaattcaggtgtcatgcctgacttttcaacccatttgctgatttccttgccaccaccatgaacgatgattggcttaaaaccaacgagtttaagaagaactacatcctgaataacttttctcttaagttcttcatctaccatagcacttccgccgtacttaactacaattatctttctgttaaatttctggatataaggaagtgcctcaacaagcacctgtgccttcataagttcctctgtcatatcttttgcactcataataatctccatttcatatttattcagatatatttgctttaaaatgctgtgtcagattagcttctgtaatcagcatttatcttgacataatcaaatgtaaggtcacaaccccatgctgtagcgcttgcatcgccctgcttaacatccgcaatagcaattacaggattctgtgaaagtatttctgttgctttctcctcgctgtaatctgtagccgttccatctttaacaatctgaagctcacctgcttcactcttaaagaatatatcaaccttttcagggtcaaagtcagcaccagaatatcccattgcacagagaattcttccccagttagcgtcatgtccgaatattgctgccttggtaagacttgatgtaacaattgacttagcaagtgtcttggcttctgccttagttgttgcaccctttacctgaacctcgaaaagacatgtacagccttcgccgtcacctgcaatcatcttggaaagctctgtaaatacatagcttaagccttcatagaaagcattataatcagcaccctcttctgtaatcttcttgttgccagccattccatttgcaagaacaagagctgtatcattagttgatgtatctccatcaactgatatcatgttaaatgaatcatcaacaattgcacttgtcatcttctgaagaagtgccttgtcaatatcgcagtctgttgttatgtagcagagcattgttgccatgttaggatgaatcattcctgcacccttgcacataccaccgattgttaccttagtaccagcaacctctacttctacagcaacctgcttgcttcttgtatctgtagtcataattgcctctgctgcctgtgttcctgcttctaatgaagcatcaagcattggagcaagcttttcaattcctgcacagattctgtcaacaggaagctgcattccgataacacctgttgaaccgataagtactgcattctccggtacatccagcacctttgcgactgcctttgcttcttctgcacatgcattatctccttcaacacctgtacatgcattggcaacaccgctgtttacaactacagcctgtgcaaagtcttcattatatacaatgtttctgtcccatttgacaggagctgcaaatactttgttagttgtaaatgttcctgctgtaacacatggcttctcactgtatacaagtgccatatctttctttccgttcttatatttaatctgtgcttcacatccggcagccttgaatcctttagctgctgtaacaccgcctttaattatattcataacatcctcctattgtaccatcacatatactctgtcattgtgcatatttcgtcgtgtaaattctgaatttacgctacatttattatggaaacattggtgcaagctgtaatccctcattctctggaagtccgaagagaaggttcatattctgtactgcctgacctgctgcacccttaacaagattatctaacgcacccatcattataagtctgttagttcttggctcaatcttaaatcctatatcaacaaagttgcttccctcaacccagcgtgtttcagggcatacatctttaggaagtactcttacgaaatattccttatcatagtacttgtcatatgctgccttaacatcttcatatgtaacatctttggcaaggttggcgtatgctgttacaagaattcctctgttcattggaaccaaatgtggtgtgaagataagctttaaatcgtctcttccacacgcataacctaactgctcctcaatctcaggtgtatgtctgtgagttcctacaccatatgccttcatgctttcattaacttcacagaaaaggttggcaaccttagcgcctcgtcctgcacctgaagttccactcttggcatcaattataattgtatccggattgattattccttccttaaccattggataaagtgtaagaattgatgttgttgtatagcagcccggattcgcaatgattcttgtgtctttgcttaccttgtctctgttaatctcacatagaccatagacagcttcatcaatatactgtggtgctttatgctcaagcttataccactgttcatatacattaacatccttaagtctgaaatctgcactcagatcaataatcttagtctttgaaagaatttcgtcattaacaagtgatgcacataagccctgtggtgttgctgtaaatataacatcaacctcgttagcaagctgctccatattgtcgtccatacattttgcatctacaagcttaaacatgtttctatatacatctgaataattctgatctatgtaacttctcgaaccgagccatacaatctctgcatccttatgtcctaataataatctgacaagctcgttacctgcgtaacctgtcgcaccgataatgcctactttaatcataactcctccttgttttgcgaagcaaaatgcatatattcaacatttatgcataaaataacgcaaaatgtaaattgataacctacattatagcaactttttttcttatgtaaaggatattttgaagaaattttatatttatacatttttattgcatatttgtgtataatatgcataatttgttgttgcatttttaaataaagtagtttattataatctgcaggtgcatagcatatgtgttttactatgtaaacttaataatatacggaggaatatataatgaaagaaaaagttattcttgcttattctggcggacttgacacaactgccatcatcccttggttaaaggaaacatacaactatgatgttgtctgcgtatgtgcagactgtggtcaggaagaggagttggacggacttgagcagagagctctctcatgtggtgctgccaagttatatatagaagatatcactgatgaattctgcgacaactacatcgttccatgtgttcaggcacacgctgtttatgaaaataaatatttacttggtacttcaatggcaagacctcttatcgctaagagacttgttgagattgcccgtaaggaaggtgctgttgctatctgccacggtgctactggtaagggtaatgaccagatcagattcgaacttacaatcaaggctttagctccagatatcaagattatcgctccttggagagattctaactggaagctccagtctcgtgaggatgagattgaatactgcagacagcatggtattcatcttccattcagcacagactgcagctacagccgtgaccgtaacatctggcatatcagccatgaaggtcttgagcttgaagatccagctaatgagcctaactacaagcatttattagttcttggatgcactcctgaggaagctccggatgaaccagaatatgttactatgacatttgaaaaaggtgttccaaagtcagttaatggcaaggctatgaaggtttctgatattatcagagagcttaacagacttggtgccaagcatggtatcggtatcattgatatcgttgagaaccgtgttgttggtatgaagtcccgtggtgtatatgagactcctggtggaactattctttacgaagcacatcaacagcttgaggaattagttctcgacagagatacaacaacattcaagatggatgttggaaacaagtttgcacaggttgtttacgaaggaaagtgggagacacctcttcgtgaagcacttcaggcattcgttgagaagactcaggaatatgtaacaggtgaagttaagttcagactttacaagggtaacatcatcaaggctggaacaacatctccatattcactttacaacgagtcaattgcatcattcaagacaggtgatatgtatgatcatcatgatgctgacggattcatcaacctcttcggtctttcacttaaggtaagagctatgaagaagcttgagaatgagaagaagaacaataagtaattaaagattataaagcagcatccccggcatggttaatagtcatgtcggggatgttgcttatttattcttaattatattctcttctttttgacttcaacttgtctttccactgctctaacgtccaattccgcgtgatggcaagcgactggattattttccaatttaagacacttacataagccaatacaatgctaatactatcaagtagaaaataacaaatacaaaaaacacaatactcagaaccagataaatagtcggttcatttcccatcactgcattcttgggatttattttactaacatatatcgtataaacctcccctcttgtatgaagcggtgaaaatatattcatacttacccagccaacataattataccctttatcgtcacggataaggaactcagaaaagtaatgattgctattaccatatgcgataccttcagttttatagaattgagtttttatgtataaatatctagccaaaaatatcatatccagcataatataaataattatatattctccatgcattattgcatcccccttaatgaatcacatctaacataatataaatcatctaccttatcttaccactccccaaagttcctcggtaaactactataacaatagcactatgtataaaccaacaaatataaactccacaatactcagaaccatatatatagtcagttcactccccataactccattatatggattatgtttttttacaaatatggtataaacatccccccttacatgataccttgaaaatatattatttgttacactgcagacataattatgccctctgtatccatatataaactcagaagtgtatcgtctgtcatttccatttgcgacgcctttggttttatagaattgggtttttatgtatagaaatcttgcaaaaaaaatcatatccagtaaaatccccataactaatgcttccattttctatccctcatattttatattagcaattatagattctttacatttactattctagcatacatcaaactttaccatttgtaaacaaccgtacctccgtgtccccgacacaagatacaattcccgaacaatcttccgtgcaaatggaggcaggctgctgtatatatcattttcaaaccgttgcgaagacgccggcacttagtaagctgggaaagctggcacacagtaccagcaaatcccagcgaacttagtaccgctgcgtcgtagcacgagcgcaagcgtgtttgaaaatgatatatacagcagcctgcctcacacatccgcacgaaacctacccctgaaatttctctctgtcaatctccttctcttccactttcctgttgacatatgtccgaagcagcgcataacacactgagctgattggaataaatgtaagcatccccattataccaaacagattgccaccgattgtaacagcaacaagcacccacattccaggcagtccaacagaacttccaacaacatgaggatatataagatttccttcaatctgctgtaatataaggaatactcccacaaatataagtgcctttaacgggcttgtcatcattataagaatcacaccgactatacagccaataaatgcaccgacaatcggaataagtgcactaaccgcaataataattcctataagaagtgcataaggcattctcaatatagacaatgtaataacaaacatcgttccaagaatacatgcttcaaggcactgtcctgacaggaaattagagaatgtagtgttggtaagtcttagcacttcaataattttatctgccctgttctcaggcatgcacacatacataagtttcttacactgtgatgcaagcttttctttctggaaaagcacataaactgagaatacaaacccaataaagaaattagtaatacctgagaagaatccgcttatagccccgattccgccattaataattcctttagttcctattgaaaggaaattcataacatttgaaagaacggaatcccagttgattgatatgctgcttaacttttcctcatactcaggatatgcagacagcttgacctgcagccagtttataagattattaactgctgtcggcacctgtcctataaggtcagctattgtgttcaccagttcaggcacaaccacaaaaagtacacctgcaataatagccagtatcaaaatcagtgtaaacatataagcaagcactcttataagtctgggatgcttcttcttacaacgcttgtcaaacagcctgttaagtcctttttcaattgctttcataggtacattgaatacaaatgcgatgactgcgccaattataaatggcattacaagtcctgcaagatatgatatagaatcaagaattccagtcacattgttaagggcaaggtatattacaattagcactgcgcctatcgtaattcccttaacaacctgactgtctttaaaatgtcctttgttcatacaacccctccactctttaaagttacttctaatatactatacagaagtccgggattcaaacatattatataaatttaagaattgtaaaatgttagttatactgtgcatcaaccatactcatcatcattcgcatattgaatgctcccatgaacttcactgatggaagatatacaaaatgcttcttctggattacacagtcatcctcatattcatcatcatacacttcaagtctcataacctcatttacaagctgacccttacccggctgtacattgaatgcgccttctatgaatggtgcgaagcagtcacgctcgccactctggtcagggtcatatgcaataaatgtatgaatcatactctcatactttgtaataaataatccattatctgcaccgctttcctttagtgcatttctgtaattgtccatctcttcctcatacactgctgactgcttattaataatctcttctaactcacccgcagtcataggaatattttctgcaaagaaaaatgcaagtggctggatgcttccatataataaaaagcagctcatgtccgaattaagagtctgtgatacctcaagcttatcagtatcacccatatacataagaactgcaaaattgcccttggcagtaaactccttaagcatgttaatagctgcctttaattctgttctcgaaaaatgtctcataatatctaattccttttcatttaaactatcgtagattatatcacctatgactgatattttcacttccaaattttacttttcataatttcatacaatcttcattcagatatatggacttcaatatgccaccacttctcaaaaagaaaggggcacgaaagctttcactttcgtgcccctttgcacttcgacactaactatagtcccaagtgcgtgaaattgcaacaataaaaatatgcgttttttccttaattcataaggtgattttctaaaaatttctttattcgtaaagtgggtacttatctgtaagtcccttaacaagttccattgccttagcctggttagcatctacatcatcaacaagcatagcaattgcttctgcaacaacatccatatcagcctcattgaagcctcttgttgtaacggctgctgtaccaagtctgataccgcttgttacgaatggagaagccggatcattaggaattgtattcttgttacatgtaatgttagctgcatccagaagcttctcaacttccttaccagtctttcccttgcttaagaggttaacaagcataaggtggttatctgtaccaccagatacgatatcaaaacctctgttcataagtccgttagcaagtgctgatgcattcttaacaacattttcagcatataccttaaagcttgggtcaagcgcttcctttaagcacactgccttaccagcaataacatgcataagaggtccgccctggattccagggaatacagccttgttaagcttgaacttctctgctgcctctgctgaagcaagaatcataccacctcttggtccacggagtgtcttatgtgttgttgttgttgtaacatctgcatatggaattgggcttgggtgtgcaccaccggctacaagacctgcaatatgtgccatatctaccataagtaatgcgccaacttcatcacagatttctctgaacttcttgaagtcgattgttcttgcataagcagaagctcctgcaataatcatcttaggcttgcattccttggcaattcttaatacttcatcataatcaataaatccgtctgctgtaacaccataaggaacgatgttaaagtattttccagaaatattaactggtgaaccgtgtgataaatgtccaccacagtcaaggctcatacccataactgtatctccaggattaacaagtgcgaagaatacagctaagttagcctgtgctcctgaatgtggctgtacatttgcatattcacagccaaaaagcttcttggctctttcaattgcaagtgtctcaacaacatcgacatactcacaaccaccgtaatatctctttccaggatatccttctgcatacttattagtaagagggcttcccatagcagccataactgccttacttacaaggttctcagaagcgataagctcgatgtggcttctctgtcttccaagttcatcatccatagcctttgcaaggtctggatcatagtttaatacttcatcaaatgaatacatataacttcctcccattatactttagtgaaacaaagtgtccctagttacttatgatataattaaattacggattagtcaatttaaagttgtgaattcctgctttttttaatatttgtttctgtatatcgactgcaactccatatccctgctcctcaagttcatatgttgattgttcaagtgccatctcaaatttttcaaccatacttaaaaaatgctgcgttgctattccttttccaagaccaagtttctttgcctcattctcaaacgacttctgatttatattccttatatcatattcgccatctatgttaagcgacattttctctgtgctgctgtcatatataacagtacttaataaatcatatgccggagctaatcttattccttttaaatcctcactatataaaagagcaatatttttaacatgattatctgtattacctataagataattaaatatacataaatcccatagccttatctgatcttcaattggattgcttgaataattttttattagttcaaatgcatctgctaaataatctttcccgtttttctcgtatttttgtgacgctgtaattccaagtgcctgtgcaaaatcctcctgatgaagtcttaatggaactttcttccccattaattctttggatgtatctaaaatctttctgtcatatctttcagttgcaaataaaaaatcattttctttatcattaagattaataataaaactatctggtgtcctaattcctagttttcttgctgtcagcaaacataactgttcattagcaacaatcttttttaaccttacatggctctgctttaatatatgtgtacttggtgccagtcccgctggctgataccattcattattattcctgtcataatataatccggtctttcctgatgccccagccaatgataaatgtgatttaataaccagttccgctgacttagttgcaccttctcttgcaaattccagcaattcttcatgtgataataatctgtaagaagattctgttatattcatatcaccttctactattcttattgctcccagacactcgcttcctaattctgaaagaactgatatataatcattttcatcaacatgaagccaacccgcaacacaccttcttgtatatccttctggtaaaagactttcaaaaaagcatcgtgttctttctggtgaaaagcttctttcatcaagcggtaaactgattgatattgctcttgaagatttatcttctatatattcctctgaatatgaaaatacagcatcgtcagaattatgccctgtaatactgccaacattaatcatatttccattacattcaatatatacctctaaatttctcattatctcccccttacattaatattaatatcaagtcccagaattgaaattaactgcattactttgccaatctcaacagttgttttacctctttctacatctgatataaaacttacactaagaccagtatattctgacaaaaatgcctgcgtatactttaattcttttctcctgttcctgattatatttccaagcccctcagaatcagttattttcataatattcacctcaacgcaaaaaacaagccgtacggctttattatacatattttctcacaaataaagccgagcggctttgttttgataaaagcattataatataagccgtacggcttagtcaattttcttttgttacataatttcattttcttgtaacaaaataatatcctgcgattattaatttatattgtgccttatgggtatagtatatatttatccaatcagaactttttgccttcaaacaaaaaacgaacccacccgaagatgagtccgtttcatagtcttaaaccggcagattcttcatactctcaagacttataacaagtgttgatgtattatgaagaagtgctgaagttgtaggctgtatgacgcccgttacaccaagtgcaataagtgcggaattgaatccgacaatcacacggtaatttctgttaatcttcttaatcagactgtcacttaatttcttaagcataagtatctggttaagatcatctgcgccgacagtgatatctgcaatctctcttgcaatctcagcaccatcacttatggcaatacctacatctgctgctgaaagcgccggtgagtcattaattccatcaccaatcataattacctttcgtctggctgcccgctctttctctacgaacttagccttgtcttctggaagaacttctgaataatattcagtaactccaacctttctggcaatagaggcggctgttctttcactgtctccggtcatcatgacaacctttgatattccagccttcttaagcccttcaataacctccggtgcttcttctcttaatggatcaattatgcatataactgctgcaagctgaccgttaattgccatataaagatgtgagcagtcatctggaagactgtcaaataacccctgctttcctgctggaattacacatgcttcatcctcaaatacaaagtgatggcttcctatgataaccttgcttgtattaataaatgttgatattccatgtgcaacaatatattcaaccttagaatgcatctcttcgtgcataaggtttcttctgccagcttcattaacaacagccttagccattgaatgtggaaaatgctcctctagacacgcagctattcttaacagctcatcttccggcattccgttaaatgaatataccctgcttactgttggcttagcctttgtaagtgtacctgtcttatcaaatacgatagtatccgcttcagcaattgcctctaagaacttaccgcccttgactgttgcactcgcctgacttgcctgtcttattgctgcaagtaccgtaataggcatagcaagcttcaatgcacatgagaaatcaaccataagtattgacaatgccttagtagtatttcgtgttaacagatatgtaagtgcagttccgccaagtgaataaggtacaagcttatctgcaagatgctctgcttttgactcaagacctgattttaacttctcagattcttcaatcatcctgacaatcttgtcatatttgcttgagcctccggcacgcttaactctgaatactatctcgccctcttctactacagttcctgcaaatacagaagttccctcacctcttcttactggctcagattctcctgtaagtgaagcctgattaaccatagcctcaccactgataacagttccatcaaatgggattacattacccatccggattattacattatctccgtccttaacatctttcacagatacctgtacttctgcatcatctgtctttaaccagaccttattaacgttaagtgacatcgttcttgcaaggtcgtcaaccgacttcttgtgtgtccagtcctctattatctcacctataccaagaagaaacattactgaaccagctgtattaaagtctcttcttaagatagaaactcctattgcagttgcatcaagaactggcacttcaagttttcttgcaagcaatgtcctgattcctttataaatgtacttcattgaagataccgttgttaataccgcacataccggtgccggaataaacaatttcttagtcattctccacaacacctgatctgccagcttttcagtataatgagaattgattgctcttcctgatgttgcaagaacatcttcaggaacctctacattgctgtatctgaacttagcaatagcttcaatcacagtctttcttgaacatctgtactcaacaactgcatcagcagttctctcatacactttggcattcgtgacgccctgcagattcttaagataatactgcaaggtatctgcctgtataaaagtcatgccagaagcatccatgtgaacacggattcttccgggcacatcatgctttattgtgaatttcatactctattacgcttcctcatcttcatctactgaatcaagtacaacttcttctgtgttatactttgtctcattgattgtcttagcatcagcatatatatcctcacagttttcctgaacagttgtagctgtcttcattatacatgatttagctcttaaaactgctgctgtacagttagtgtaaagcttctttgcgtccttgcttgtaagaatcttaattccagctgttccaaataatacacctgctgcaaaaagtcctggtttctttaagttattaattttcatactgtgctcctctctgtccatattggacaataaatgtttcttaagtttgacggttattatattacacattatgtaacatttctacataaatccacttattgagaaatcttctcaatatagcaaaaggagagatgaaacagtttcatctctcccttattagtaaatattatttattaactgaaactgcctttttcctgtcaactacacttgttatcttctgattcttaatgtatccgcaggcttctagccctgactcaataattttactccatttgctttctgataaattaattgacgaatcatcgtttaatcttacagtataaccgccattatcattctcatcacaagttattctgtacatattcttacggttaattgcacctatttcttccagtgtattaaccattctatatacagttgcagccccaatcttaggatccttttttactgccttgtaataaatctctttacagcttgagcagtcctcttcaagaattacatcaagaagcataagcctctgtttagttatcctgcaaccctgctgcttgagacgagaaataataatgtctttgtctttatcaggatttctgaccacccgttacctccttttaatggcagtggcctttgcatttaccgcagtcgccaccacatgtgaacgatttaccgtttttcttgtcgtgtaccatactgcgtacaataagcgcaactataatcaccaatataactcctactataattgttcccagcataattacacctccgataatatatcatttaattactttgttgcatttaaaagcttcttagaatcaacctttaacgtcttactttccttatatggtctgaataacagatagatgaaaccaacaattataagaattgcgattactgtgaatacattaaatgctgtgtcgccagtaataagaccagcaatctggttaattacaagacctacaaggtaagcatatccacactggtatccgattgcaatccagaaccacttagtgttgttcatctctctcttgatagcacccattgctgcgaagcaaggagcacagagaagattaaatgcaaggaatgcatatccgcttactactgtaaatgtagctgccatgttagcatatactgttccctcacctgctgagtaaaggatacccattgtaccaacgatattctccttagcaacaagaccagtaatagaagcaacagttgcctgccagttaccaaatcctaaaggagcaaatatccatgcgattgccttaccaattctgccaagaatagagaagtcaatctgatcatctgcaagcattgtaaatgttccatcaacaaatccgaagtatgttgtgaaccagataatgattgttgaaagtgtgataattgttccggccttcttgatgaatgaccatccacgctcccacatgcttcttaatactgtaccaactgttggaagatggtatgctggaagctccataacgaatggtgccggatctccaacgaataactttgtcttctttaagatgatacctgagcagataattgagaatattccaaggaaatatgctgatggagcaacccatggagcaccatcaaagatagctccggcaaccattgctatgaatggaagcttagctccacaaggaataaatgttgttgtcataattgtcatcttacggtctctgtcgttctcaattgtacgtgaagccatgataccaggaacaccacaacctgaaccgataagcattggaatgaatgacttacctgaaagaccgaacttacggaaaattctatccataatgaatgctatacgtgccatataaccgcaagactcaaggaatgcaaggaatatgaataatacaagcatctgtggaacgaagccaagtactgcaccaacaccggctacaataccatcaaggataagaccctttaaccagtctacacaaccgattgcatcaagtcctgactcaagaagcactgggataccaggaacccatacaccataattagcaggatctggagctgcaccatcattgtctatacactgttttatagcttccttaacaccggctgcatctgttgtctctgttgttacactaagattttcctcatcttctacatcataatctaatgtaagattagctggaactgtgttttcaagtttctttaatgctgctactgctgcatctgaatcataatcatcagcttctgtatcaatagcatctgcatactcttcacctttatcaccaaggctgtcgatatatgccccgatgattgcatctgaatcaccatactcatcagctacttcttcgtaagctgaagtgccaattccgaagagatgccagccatcaccgaacacaccatcgttagcccagtctgttgcccatgtaccaactgttgtaactgatacatagtatacgatgaacattacaactgcaaatattggaagtgctaagaatctgttagtaactattctatcaatcttatctgatgtagaaagcttcttctcagacttctttgcaaaacatccactgataattgaagatatatatgtatatctttcattagtgataatactttctgtatcatcatcaaattctttctcaagagtctcaatctcagctgaaacatctggaacattcttcataagaactttaatcttatcatccttctcaagaagcttgatagcaaagaatctcttctgttcttcaacaatatcaagaccaagtttatcttctaccgctgatattgctgcctcaaccttatcgtcaaacttgtgagcgattgtattaagcttcttgctctctgcaagcttaacagccttttctgctgcttccttaataccagttcccttaagtgctgatatctcaacagcttcacagccaaggttctttcctaacttggcaagatcaaccttatccccgttcttttccatgatatcaaccatgttaacagccatgataaccggaatacccagttccataatctgtgttgaaagataaaggtttctttcaatgttagtaccatcaacaatattgatgattgcatcaggtctttcgttaataagataatttcttgctactacctcctcaagggtataaggagaaagtgaataaataccaggtaaatccatgatagtgacatctttatgtccctttaatttaccttcctttttctcaactgtaacacccggccagttaccaacgaactgattagaaccggtcaaagcattaaacaatgttgttttaccgcagtttggattacctgctaatgcaattttaattgacatttgactacctcatttcttttatataaatgcttatgcatttgctaacaaacattcgaccactcttacattaattagattctactaacctttgtgtaaaaaaaatcagccgacttctatcatctcggcatcggctttacgaagcgataattcatagcctcttactgtaacctctacaggatctcccaaaggtgctacctttcttacatagacttcaactcccttagtaattcccatatccataattcttctcttaaccggaccatcaccatttaacctggtaactttaacagtctggcctacagatacatctcttaaagtcatagtttatctccttcttattttagttttatataagaactggcatattcagtcctttataccataattttattagccatatcttttcctatggcaactcttgattccttaatgttaacaatgacattaccgccagctttagaaacaactgttaccactgctcccggaacgaatccaagattctcaagaaaacgtcttatttcctcctttccaccaatccgctggattgtgtatggagttccttcatcaatcatagttaatggcataagctcatctcctctttttagcatattgataatgtttttcattaccaccttggttagtatattctaatggtcattagatgtcaacaacttttgttatatttttataatattttttagaacagattaacccctgattgatataaccaaccaggggcaaaatgtgcaatcttttcaatatattacaggcaataaataattatgctaacgctgccccaagttttttgcagttttcaacagcatcatcatctggtgcttcctgacagattacgctgtctgttgcaagaacagcccctgcagccttgcttctttcttcccagtcagccatccattcgccgcttccccatccatatgaaccgaaaagtgcaattttcttatcgctaaggcttccttctacctctgtgaacattggttcaaactctgattcctcgagattctctgctcccattgccgggcatccgaatgcgattccatcatattcagcaacctttcctgaattaaaatcatttgccacaagtacatcaacctctgctccagctcctttagcaccttctgcaactgcgttagccattgtctctgtattacctgttccactccaataaactactgctactttactcattatccaatctctcctttttactttttatatgcttaaaccgttaatgcagatatgcttctgcctcggtcaaagactcttaaatatacttctgtgcattttctgtaacgtgcaaacatcttctggctgaatgcctcatcacaatacaccttccataccccacaacatttgtaattgcagcccttttgtcttataaactggattacatcttccaccgggtaacttaagaacagccctatttcatgcggaaaacatgtgttctcctccactctctgtttaagatgcctgatgcttgctcccactttataatctgtatatccaaatgttttcagtacattttgtactgctggctgtgacaaatccttctctaatctgtcaggtctgaacacatataaaagtgcactcttttcatttcgctttaaaaatgtaacatacacgcctttggcgttaagttttctgtttacacttgcaagctctttcctaaaatcagatatattatcatatctgtaattaaaaaggttgcccgtctttaatccggcaagcgtcggagaacactcttttataacttcccgctcaattcttcccaatacatctgtacagaccatttttcttttccttccatattgcactttatcctcttctttatcagcatgccctgctttcgcttaaatatgtttctaaaacacttgtaagcgatgccgcactgcttgaatgtgttctcacaatatcaacatcattcttcttagcctctgtaacagctgataaaaccatcttatgagaaaccgtattagtaaacagtatcataagatccggtgttccaatctgcttggaaaatccacttttttccttaacaaataccttcgccttgcagccgtgtttcttacatatctgctgatactggcgttccatacattcatttccaccaataataactacgctcatattctcgtcctttcatttaccttacttttgttagctttgtctaacccgtatttataaaataacggatatcctaactggatacccgttacatcagttagctttaactaactattaaaatatcatctttctatatagctgtcaatacatttttacaaattatctgtcaaatggtgcatcgtcatcattattgtcaaagtcatcaatatccgcttgaccatctgaatggtcatgaccgtcaatcatattctctctattgacaactctcttgatatctctctgcttctccacaagatctgataacagctccttagtagccttaggcctcttgatattcttaatctcaaagtcacccattgtcttgtctccagagcatactttaatagttcctactccgacaagtctctgcatgaatgagcgctccaatgaaatatccataatacgatacagtcttacctcatcatctttaatgctgaaaaatcctttgcttataaagaatctgtccttagatacactgtatcttgtaaatgaccacggaagtccgaggaagagaattctcttcctgtccttccataatatatctgtgctgactttatctcttgccataatatcccctccaattctaatggcacactgctgacatattctatgtattacttgaaatacttaacaccagattcgaatatcttaatatcctgctcaccatatatattaatagcaacactgtcaccgcgtctctcagaatgtgccatcttaccgaagcatcttccgtctgggcttgtgataccttcaatagccatgtatgaaccattgatattccactcttcatccatagatacattaccatcaaggtcacagtactgtgtagcaacctgtccgttagcaaagagcttatcaagccattccttaggagcaacaaatcttccttcaccatgtgaagctggattgcagtatactccgccaagctctgcattagcaagccatgggcttaaattgctgacaaccttagtatataccatcttagatatatgacggttaattgtattaaatgtaagtgtaggtgactgtgcatcctgtcctgtaatctttccgttaggtacaagaccaagctttataagagcctggaatccattacagataccaagtgcaagaccatctctctcattaagtagcttctcaactgcttccttcatcttggcattacggaatgctgtagcgaagaacttggcagaaccatctggttcatcacctgctgagaatccaccagggaacataataatctgtgcctggttaatagccttctcaaattcatctacagactctctgatactctcagcatcaaggttcttgaacaccttaacgattgtatcagcgccggctctttcaaatgccttggcactatcgtactcacagttagttcctgggaataccgggataaatactgttggcttagcaaccttattcttgcatacatgtacgcttggtgcttcatataacctgctttcaaccggtgtagtttccttagaagccttagtcgggaatacaccctcaagagtatcagcccatacgcttaatgcttcttctacattaattgaaacttccttgtatgtgaacttaccattatccttaacagtaccaaccttagtataagttgtagtaatctcactaagcttgtccgctggaacttctgcaacgatacagccataagctggtgcaaagaggtcatcttccttaacgtctgcgctgatctcaaaacctaacttattaccaaatgccatcttgctgagtgctggcacaagtccgttagcatcaagaacatatgcagatacgattgccctcttctggataagctcatgtattgcactgtagagtgccttaacctgttcgaaatctggaagatcatactgattcttcttaatatcaaatctgactaatacatcaccatcattcttaagttcaggagtaataatatctccttccttagctacatcaatagcaaatgagcagagtgttggtggaacatcaatatgttcaaatgttcctgacatactgtccttaccaccgattgatggaagtccgaatcccatctgtgcttcatatgcaccaagaagtgcagcaaatggctggctccatctttctggatcttctgtcattcttctgaagtattcctgatatgtgaatctgatcttactgaaatcaccaccggcagcaacaatcttagctacagaatctataacagcatagattgctccatgatatgggctccatgatgaaagatatggatcaaatccataagacatcatagttactgtatcgcatgaacccttaagcactggaagctttgcaaccatgctctgtgtctctgtaagctgatatttaccaccatatggcatatatactgaaccggctccgatagaaccatcaaatctctcaacaagtcccttctgtgagcattcgttaaggtctgctaaagtctttaaccacttaccgcgtacatctgtaaccttaaccggcttaaggtaatcgtcttcctgtgaaggaatatcaactacaaccttagtctcctgatgagcaccattagtatcaaggaatgctcttgaaatattaacgatatccttgcctctccagttaagaacaagtcttggttcttctgttacaacagctacctcaactgcctctaagttctcctcagcagcatactgaaggaattccttaacatccttaggatcaactacaacagccattctctcctgagactctgatatagcaagctctgttccatcaagaccttcatacttcttaggaactttatcaagatctaccttaagacctgctgcaagctcaccaattgcaacggatacaccgcctgcaccaaagtcattacatttcttaataagcttagtaacctctggtcttctgaagagtctctgcatcttacgctctgtaggagcattacccttctgaacctcagcaccacaatcctcaatagacttctctgtatgaaccttagatgaacctgtagctccgccacatccatctcgtcctgttcttccaccaagaagaataatgatatctcccgggtcagaattctctctcttaactgcacttcttggagcagcagctataactgcaccaatctccattctcttggcaacataatcaggatggtagatttccttaacatatcctgtagcaagtccgatctggttaccatatgagctgtatccgtgagcagcacctgtaacaagctttctctgtggaagctttccatgaattgtctctgataccggaacagtaggatctgctgcacctgtaattctcattgcctgatatacatatgtacggcctgacaatggatctcttatagcaccacctagacaagttgctgcgccaccaaatggctcaatctctgttggatggttatgtgtctcattcttaaagttaacaagccattcctctgtctttccatcaatctcaactggaacaacaattgagcaggcattaatctcatcagattcttcctgatcagctaacttgccctcagcctttaacttcttagcacccataagtgcaaggtccataaggcatacgaacttgtccttacggtccttatatatttctgctctgtctgaaagatacttgttatatgtagcttccataggggctttataaaatccgtccttaaacttaacatctgtaagctctgttgcaaatgttgtgtgacggcaatgatctgaccagtatgtatcaagtactctgatttcagtcatagaaggatcacgcttctcaacactagcaaaatgctcctgaatgaacttaaaatccttaaatgtcatggcaagtcctaaagaatcatataattcctttaacttatcctctggcatatccttgaatccgtcaaaataaataacatcagcaggagtcttgaactcagtaactaaagtttctggaatatcctctgctgcctgtcttgaatcaacagggttaatgcagtgttccttaatcctgttcttctcctcatcagtaacagttcctgtcaatacataagttacagcagtcttgataactggtgtctcattctcattaaagaacttaacacactgttctgcagaatcagctctctggtcgaactgtcctggaagatactctacagagaacacgaaatcgtcctttcccgctggaaatgttccctcataaacatcatctaccggtggctcagaaaaaacagtagtaagtgctttcttatatgtttcttctgaaagattctcaatatcataacggataagaactcttacatctgtaatagtctttattccaagatatcctcctatctcctcaagtaattctttcgcattaactgcaaatggtttctttttctcgacaaaaactctctttacgccgctcatatcttcctcctgagattagttatattaattattaatatttaaccattgtatcacaataaaacatattttcaaacaactattcatgcattcttcttattatcttgtaaacaacctgattacccattacggtaggacctgtatgtgcgaagaaaacaataccgtctgtctgtgatattatctcactcttaacagtaccctcgcatgggtcaagaatctgtgctataagctcaccatgatatacaggatcacccggctctttaagtctcttgtaaaatcctgcatcataagtcttgactgccataaggtcaaattcgttgataacacttgcaatatatccactgtgattgttgtacttaagaatacccattctggttaaaaacctgagaacagatgacacagcctgtcttgcagatttctcatcaatcatatctgtgctgttagtatatattgaaaatgcattagtaccattcatctgccagttataattaagtgtcactgtatccattggcttcggctttctaataacaacgtactgaagtccgaacagattggcaagacttgcactctgaaatcctgtatccatcatctttacatgaggaataaaatcacccggcatataaaagcttgcaaaatgtatgccataactgtaacccttaattctgtcaaaaagtgttcctgctatctgcttggttgtatctccattaacatccccaggaaaagctctgttaatatcagaattatctgtaggccagaatctctttccaacattcatggaaaatctgttaacagatgggataacaagaatctcatgattgtgcgatattgcaccatgagcctcaagctctttaagtgccttaacaagctgcgaacatatatacagctgctgtatctcattacctcttaatgcaccaacaatacatgccgacttctcaccaccgccgaatctgtagccttctatctgataatcttctctatatataccctttaacgaataaataatctctttcttcattatctgccaccataaactcttgctataagagcccccttatgtactaccggattctctcttaatgtaaatataattccatctgtaggcgattcaattctctggattattcttccctcaataggttcgataatatctcctatatgcgttccaattccaatccttcccatagaatcaactgctgatacgaatattccgctttccttagcagtaagaaatgtaacctcaccctctgtagagataataggttcattcacttctttcggctcatcatcccatatccccatatgagacataaggttaaatataccatcaacaatatccctgcaatactttggcgtaattctgtttccaacacccatctccgtaacaagagtaggcacaccaagatgattaagactataagcaagagttgcatcaagcacagtaatagacgaatatatccacacaaattgtgcattcatcatcttcgcataaggaagaagcttttcctgcgtatcatcattaattcttacctgtggcatctcatttacaaatatattgcttgaatggatatcaatacacagatcgcttccaataatatcttcaataatacctgctgccacatattcagccatcgctccattattatcaccagggaaaaccctgttcatatcaaggtcaaacataggaattcctcttgaacctgtatcaagtccaagaggattaatatctggataaatatctacaattcctttaagcttattcttctctctttcaatccttctgataacctcatagcagatatactgtccgtcaagttcatccccatgagtgcctgtaactatagaaatccttggcatatcaataccattttcttcattcgtaagtctgttctttcttactaccagcctttcatgcaccggcaattccaccgaaacaacttcttctatcataatactctccctgtaatatacttattcatcataatccctaagaataatcgtgcttggcgtcttcttaacaataatatgtgaaaatacagaacttggcatgtaagtcttatcatccatatataccctgcttcccggatatatatgattctttactttaacaactgctctctctgaatctcttataagattgtataatgccttgctcttttcttcaagcttggctttctgagccatctttacaatctttgactgggtaactctcaatgccattttactatcatacttttcaggcatgttctgtttaatcatctcaaacttcttattagccatttcaaaggcttcaatctgttcgtccacctccttaagctccataataagttctgcatactcttttctgatttctttggtcgaaccaaccctcaacaaagtctttacattgctttcatgtccacatgatgtagtactgattcccataacaccagttacatcaccacctataatagaacctatgggtccctcaacaaataccctgccatatgtaagcaccctgcagttaagaatataattacactgtaagtctcctttggcaataacctctgtattctcaaaaaatctgccagatatatttccccctgcctcgatctttcctgaattcttagtattaacgccatcctttaatacaatatccttcccagcaataagtgttgctccctcaacgaagcctccaacatatatacttcccatggcatgaactgttacaccacttctcacactgcctgtaatattaacatccccgttaaagtcaatattacccatactcatgtcaagattaccattaacctcatacacattaacaacacttaaatcatagttgcagtattcaatctttccagatattgcagcataagtttctttcccatcctcagatgtcttaaagcccttaccatgcagtcttggcttgggttttcctggtttaggcacaagcagctttccacatacatcaaagccaaactcccctttagtcggctcatgatatcttgccagcagatccccctcattaaccttttcaaatctcttctggttaaagtaatcaatagaaccatcttctcttactgtaggtctgttattattaattgcatctgtatcaaagaaaaactcataatatccatcttttcctgcctctaccggtttaccaaaagcaacttcaaccggctggtcatatattttttgtgaaatcatccatcgaattttttcttcatctattcccgtcttaattccattaagcgatagcttattcatgacttcatcatatgtatatccttcatcacatttgccaagcctgactgatgcgctcatattatcatctgcaatatatacataaacctcatgtaactcgatatcatctatatcagctgtttcattaactatttctgtattgctcatgctgttccccctttccgaaggtcttatccattcattatcaaaacactgtactgtaatagctgcatcttaacatccatacttaagcagcccatccagattacttcccctctcaagtgcaagtcttatcttctccatctctttaaaggtatatcttggatcagcatataaagaaacatctacaccgcttgtaagtcccataagaatttcctgtgactgcaattcattaagtgcaggcttctcgtcattccatttatcagaaattctgtgtcttgcctctttcatgcttaccgcatcaataaacggatctgcatattcagaaacatctattccttcttcaagcccaagtcttatctgcttcatctgtcctgatgaaaatccaaccatgttatatggagtaacatcaatcccttcctcaagtccaagtctaatctgttccatctgttttccattgtattcatgaagcagatacttagttatatcaacacaattgtgtattcccagccttatctcattgagctgatattcatcataattatcctcaacaaaaaatgtaaggtcaatctcttctttttttgcaagtcttatctgtcttaatacctctcctgaataaccaagctttgcatacctggtcagatcataattaagctctgatgcaagccttatctctctcataacagaatgactgaacttaggattacatatatcatccatattcattccgctacgcacagcctgcttcagttcttccatctgcatataatcatactgtgcatctgcaaatctgcttacatcaagtttttcttccagaccaagtcttaatgctttcatctgggcagcgttaaattcctctttgcaatacacactcacatcaacgccattctcaattcctctgataatctcaatagtctgtaattcatcaaatcccagagactgccaggcctgcttgtctacagttttgttttctatattcttattaatctcttccacgttctgcataagcccatctcccataatcaaaccaaatcatcatatatccggaccttaattatatctgtctaaattttatcacacatacagtccgactacaagttctaacattgtacattttttatcaatgctctacatatcctgttccgtccagaaatccttaatacatttataagcattacccagactgactggaaatatcctgttccactccctaggatacatacgctcatattcaccagtcataaatctgtcatccagaagtgcaataactcccttatccgtatccgtccttataacccttcctgctgcctgaagcaccttattcattcccggaataacataagcatacgaatatccatttttgccaaactcatcaaaataatcccttagaatgttacgctccctgcacaccatcggaatcccagttccgacaatgacagctccgataaggctctcatcctttaagtcaattccttcggaaaatattcctccaagcacacagaagcctgcaagcgaagccccttctggaagttcctcgtaaaatgctgataagaaattttccttgtcagcctccttcataaaccttccctgcacaagcacatttacacagctttctggtaaaaatgtatcttctccaccacattcgaccacattaacaccattttcccacctgaagcactcaagaacactctccatgtaagaatatgacggaaagaacaccatatatctgccgcttctgccagaaatcatatgcataatataatcatgtaccttggcatattcccttgcatttcttcttgtataacggcttgtcacatcagtagccacgacaattctcttattatcaggttcaaaagaagagtgtgcatacaccgctctttctgatacatcacctgaaagcatttccttaaaataattaaccggaagcagcgttgccgagaagaacaccgtgcttctgccctgtgaaagtctctcacttatgttgccagacgggtcaacacagtacagatgtacaagaaagtttccatcattatcatgctcattataatagacatatttttcatcagcacagtcatacatattaagaaaatgtctcactgcaaagaaaaactctaaaagctcattagtcacaggctcacccttatgcctttccataaacttctgcataagtcccatgacacgctcaaggctggctggaaatgttccaagaccactcacaaccatgaatgtatcgcactgtcttttatattcgagcaactgcttgttacatctgtcaagtgcgcctgcaagccgtttgtccatctctttgacaagcttcttagccgcaagaaaatcttcttttttcaacactgcgctgtacatttctcttgctctgtccacaaggttatgtgcttcatccacaagaaacacataatcacccttcgcaccattgccaaaatacctcttaagcgacgcatccgggtcaaatacataattataatcacatataattccatcacaccagtacgaaacatcaagcgacatctcgaacggacagacattatgtctgttggcatattccatgacattatctcttccgataaccatctggctcgttataatgtcgtacacagcatcattaatcctgtcaaaatgccccttggcataaggacatgccacggggttgcagttgcgctcatcaagtggacatattttgtccttcgctgtaagagtaacagttctcatatgaagcccgttatctcttaatatagcataagtatcctccgcaacagttctcgttattgtctttgacgtcaggtaaaatatcttgtctgacatctgctgtcctaatgcctgcacagccgggaacacagtagacaacgtctttccgacacctgtaggtgcctgaatatatagattggtattatcttcaatagccctgtatacactcacgcacagattcttctgcccctccctgtattcataagggaacttaagttctctgattgattccgtccttttatgcctctcatcaaatgtataatcagtccatctcttaaagcctgtaatcagcttattaaaccactcttcaattctttcaaatgtatattcttccagaaacttgttgattgtctcaggctcaggagtaacgtaagtcatctggattccaatcttagacagcttcttctggcttgcatatatatagccatataccagtgcctgggctttatgcacataaaccggttctttcagcagagaaacatctgtctgcatagtctttatctcatcaattattgcatcgctctccggctctttattaccatcctcgtcataattaatatctgcaataataccgtcagccctgccttcaacctgtaatacatactcaatccctaagtcagatacaagcggtatctcaatctttaaaggcacttctgcatgatacatagttcccatgctgtgctggattttcctgtgaatccttgccccctcctgcatgattttcacatcattgctgcctgtattcctgttgtcaatatcaccttctgcacacatgaattccacaagatttcttacagatattcgaaagcagtttccatttacagagtacatactatctccattcaataatgttcttcaatatcgtatatataggcattgcctgtctttccgactcttttaacctgttccatgtaattaagcattgcaagtacactggcagcagtctgcctgtcaatatgcgctgcatttgcaaaatccgctgaagtaaagttcttctcaagtccctctggtacaaactgcatataatcctgtggacagtccagttcaactatctttcttattccaacaggaatgcggtcataacgcacacttccgcgcttcttatcgtaactccagccattaagaagcttatattcttccatatcaatcagcagcaatgtaaccttaagattctgattctttaaaaatgctttaatcttatatagttcaaacatcgcatcatacatagaacatcgcttcggagactttcttctggaagtaatgtcccctgtttccggctcaatccagcttaaatacttctcatatggcattggatatacaaccctcacctgatattcattcaggaacactgacaacttatcccttaacttgttaagctgcctcgtctgaatctcaattatcccatgctcgttatatatatctgcaaaataaccgtctattgcaacctcatgattatcctcatcgggttcataatacatttttaatactgcatgcagcgtcttttccgacaaagtacctatccccttgtcattatgtctcttaccgattatcttctcttttgcctcatcaaaagcctgactgtctatatattgaactggttctgctgcagatttcttttttgacattgtgtacctcgtatcagatatatgttatcattgataacaagtatcttacgaatacctaaaaaaatcaaggcatttaccgatataacctatataaatccaattaagaacaggagaaaaacatgatatcaataagcatgtgcatgattgtaaaaaatgagcaggacattcttgcaaggtgtcttgattcatacgcaggaacttatgatgaattgattattgtagacacaggctcaactgacaatactaaagaaattgccgctcactacaccgataaaatatatgactttgaatggataaatgatttttcagccgcaagaaattttgcattttccaaagctggatgtgactacatattcagtgctgacgcagacgaagtgcttgatgataccaacaactacgcattaagagaattgaaacatatgcttcttccagagatagacattgttcagatgtattatgtcaatgcatcagaatataattctgtatacaatgcacacaaagaactccgcccgaagcttttcaaaaggctccgtccattcacatggatttcaccaatacatgaaacagtacggctcacgccaatcgtatatgacagtgacattgaaattcttcacatgcaggcgggcgaccatagcaaaagagacttttcaacatatttcaaagcatttgaaaaaggagtccacattgaagattatgtagttaccatgctgtgtaaagaacttcttatatccggtgaagattccgactttattgctttcaggaatatatttgaaaatattctttccaaagaaggcagaagcaatgatttaatgaaagaaatcaactgtattcttgctaagatatatatggcagacggtgacactgacgcattctttaagaccactttaaaagcagttgccgacaatcctcctgctgaaatgtgtctgattctcggtacattttacatgaaccagacagactatgaagaagctgtgttgtggctgtataatgctgcatttgatacggaaagcatacttgatgtggcaagcagcggaaataagcctttatttttgcttggcagatgctatgaagaacttgcaaagacttcagatgacgcatacctgtgtgcacagtacaaggaaatgtctgacgattattacaatcaggctgataactggtcgcttccagaagaataaaaaaaccttagtgaaaccgtcaatgatttcactaaggcttttttattatttatcatcctcaacatcaaagagcttcaactcttcaacatcactcttacctgacttatcgtctccataggatatcttatcagatgatgtatcaagttcttcataactgtcatcttcatcctcggcatatccatcaattaccttctctgtatattcatcaaggtcaacaccatcttttgatgccatgttaaacactttcttaactttcgcaagcttagtacaaagaacaatagtaatcactataaatgcagctattatcagtccaagtattaatactatcgtcagccataatctgttgtttcctgatgtttttccattatcagccttaacataagcattagcagtatcagatttaacaacagaatatgcctgtatagttccatcacttaccctgtatctgaaccagcccttctctccaagagaacttactccgtagaacaggcagtactttctgtcagcgtccataagtacctgcacctctttgccattcatggtaaatttagtaaatgcataacccgccggtttttctaacgagttagttattggcagcacaacatatgttatctcaggttctgcaacagtattgtatggtgaaaatgttttcgcagtctcatcatagatgtagaacccgccttttccatcttcactttcaagatacataaggataagacctgtctttatgcctttaaccgcatttatcttctgaccattataatcatagtcaatctcctgatatccatctggaattgtgattcctgaataatcctttacaacagaatacttcctgccatctatcgtcacagttccatcattattaaccgtctgtgatacatcttctgtaacagcttctgtctttgactcagcctctgttgttgcttcctgaccatcctcaagtcttgttgtatatattatatatttcttaactgaaccatcttctgcagtaacagtaattgttgttgtattacttcccgggtccattcttctaccgcttatgcttacatcagcagcattatcattagctacagcacttacaaccagttctttaacattagcatcaacagttgcattgtatgttgtcctgtctggtgaaaatgctggtgaaagcgttcccggacttatctgcagggactttaatgtgttgtctgaagaatagctggctggagcttttacattaactgatcctgaagatgttgttaatgacatataatcttcatctgccgaagatgtatacgacgttgatttatctactgatatcgtcgctgttcccggattaatagtcttaaaaacaacatcaaatgaagttgcatttggagatattaatcttcctgttcctccaccgccagcatcaaatcctttcacatactgtaatatacttgaatcataatttattcgtaaatcacacagttctatctttacatcagatgatgctgttattgttattgttacctcatcaccaacattggcactggcagaacttatagaaacatgtgctgtctgtgctgcttttacattagtcagaccagaaaacattaatatgctcatcaacattgccattactaatgcagttattctttttatgttattcataatattctccaatataattactgtacaatatatctgatatcaagaacatgtctcttaacatacaacatatctatactgctgactgtaccatcatgattagcatcagcggctttataataagcacttgtaagaattctaatatcaagaacatgtctcttaatatataacatatcaatacttgttatcttaccatctccgttagcatctccgtatataacaactgcgtatgatgcatactcatctccatctgaagtatatacaacaaatctgtctccggttgctattatttcagatgttttctctgctgaatctgagccatatatctttccataacatccattcttgaatgaaatactgcttataacatcatcagctgtgctttcaacctcaaatcctgatataaatcttccttcttcatctatatcaaagcttgtatcaaagccattctcttctgatggatcagggtctggaaccggatcaggatctggtattggatcagcttcttttcttacgatattgattacatagtcctgattttctccattctctgctgtaacagtaacaactattctgttgttacctacagataatgagtactctccaaagccttctacttcagcactatcagctaacttatcacctgatacatatacacttgtaacatcattatcaacaatcagatcatatgatgtcgtgtataatgaaaatgatggtgttaatgaatatccatcaacatacaaatccttaagtctgttattaggacttccatctcctgtaggaattgcacatacctcatctggcatattatcatatacaggaattataaacttaaatgatgtgttattaagtgttgtttcactatatgctctcttgcttgtctttgcctctgattttggtgcaaaaacattagtcatatactgatgcgaataattaaccacatcaaacttttcataatatatagtatcctgtcctttatttatgtaccatttgccaagattaattgctccacctactaccgctttatatctcgtattccaaggtcttaatgtaccagaatcagattcctttgcatatcttaatccattctgtacagcagtataaccacctgacgcatatgcattctgactgtaataattataatagcctacatatccgcttacattacctgatatctgtcttcccgttccattatatccctgttcctgaattattctcgtagcaagatgatatgggctaacctgagacatttctcctgctttcatcaaaagtgaaggataagtataaccgtcaagatcatgacttgaaccgtccatgaacgaaccacttattatactctcaactccactcatattctgaacagatgaatcatatgacagtgcctcaaacataaatatatatgtatcatcaaggaaatttcttggatcaagtacatactgtaccaactcacttgaagcctgtacatatccaccactatcaaaagaataccactcaccggtttcccagttatagcaaccatctgctgtagatttccatgaacttatattatccttatgaacaaggcttctggttttcacattctgcttctcaaccattgtgttccagtcagtcccattatggtccgccacaaacacccagttaggatactgcgcatgaagctgtcttaacccatccttataactatccgggaatccctgtgaatcaaggtactcctcaaaatctgcatccggcttataatcatttctcttatcaacagttatgtagccgccatatatatagcctctctcataactgccattaagataaaatcctatgccgtaccacgtatcaccgtcgtcatcagttgtctcttcatatatatcaaacttaaatccaccgcttacagttgtaataatactgctgtttgttgtaggaccttttctgattcttaagcctgtaacatcataattaacatgcccctgaccaatggactcttcagccttagtattaagtacagaagtaaccgtaaggcatgtcagcacaagcatacataacatgacaccaattgcagctattctttttgcactacatttgtatcctgatttcatctaatcacctgactcctgaagtattataataactagtttcttccaaattctgaaagctttaagccctcatttctctcaagtaccatattaacagaccagctattggcaaataccagaagtggattgcccttaaggtctttaatcttcttcatatctgatgtaccgacaattctgtttacatcaacttcctcaggattctcaatccagcggatatgctcatatggaagcggctcaagtctgatatcaacaccgtattcattcttaagacggtattcgagaacttcaaactgaagaacaccgacaacacccacgataatttcttccattcctgtattgaattcctggaaaatctgaatcgcaccttcctgtgcaatctggttgatacccttaataaactgctttctcttcatagtatcaagctgtcttactcttgcaaaatgttctggtgcaaatgtagggattccctcaaatgcaaatttcttgttagacttgcatattgtatcaccaatagaaaaaatacccggatcaaatacaccgataatatctcctgcatatgcctcatcaacaatatgtctctcctccgccatcatctgctgtggctgactgagtcttatcttcttgccgccctgcacatggttggcttccattccggcttcaaacttacctgaacatattctcatgaaagcaattctatctctgtgtgctttattcatattagcctgaatcttgaatacaaatgctgagaaatcctcagtaaatggatcaataattccctgatcagcctttcttggaagcggagaagttgtcattgataagaaatgctcaaggaaagtctgaacaccaaagttagtaagcgctgaaccaaagaataccggtgtaaggtcacctgcacttaccatctcctgatcaaactctgcacttgctccgtctaacagttcaatatcttcctgaagcttgtcatagaaagcatccccaattctgtccttaagaacagcctcatctgatgcgtcaacaatctcagtatcaacttccttctgtccattcatagctgccttgaataaagaaacatttttctctttgcggtcatatacacccttgaattccttaccacagccgataggccagttaattgggcatgtagcaattccaagtacactctcaatctcatcaagaagttcaaatgggtcattagcctccctgtccatcttattaataaatgtaaatataggaatgtgtctcataacacataccttgaaaagcttgatagtctgtttctcaacacccttagaagcgtcaataaccatgaccgcagaatctgctgccataagagttctataagtatcctcagagaaatcctgatgtcccggagtatcaaggatattaatacagtagccttcgtagttaaactgaagaactgaagaagttaccgaaatacctctttccttctcaatctccatccagtcagaaaccgcatgcttggcagtcttcttcccctttacagaacctgcaaggttaatagctcctccataaagcaggaacttctctgttaatgttgtcttaccagcatccgggtgagagataatggcaaatgtccttcttttcttaatttcactttctaaactcactgttttactcctttataacataatacaaaacataagcctgtgatgcgtctgggcttcacaggcttactctaatcaatagtcttggaattattcacggttaagaccgaacttgtatgaaacctcagacttatcatcaattcttctgaaaatgttgactactctgtccataaccggttcaaaatcttcctcattctcaacttcaacagtaacaacctgtccatcttccttaataactgcgtccttaacaagtgctaatgccttgatatcttcctcagtctgggcaacctgctcaggtgttgttaacatctttgatttactcttatacttaacagcgtatgttcttgtcatcatatcctcctattggcttttcgtagcaatataatctcatatgtcattatattatataacatgttttgagattatgcaatgtttactttttccttgtcttttttactaagtgttcacaacaacagcagatgacagaaaataaaactgtccccaaagttattacagtaaattcttttataccatattctctctgtccatatcttaattcatcatatacaaaccatactcccatatgagttaaatatatgtacttactcacctcacgaatctctttttgcaatatattagattttattctaatacttctaatgacatcaaataataatactgaagacaatatatataaaaactgctttaatatatgattacaaaaaaacatatttattatgataacagcaatatatgagcacagactcacaaaaacattcgttttaacctctgctataatcatgcccagtaatatatataataatcctgataacatcctgatatagttatctttaataaataatgtgccaattatcatacatagcatcgtaattatacatatactatttattctactcagttttcccattctgataaatatcataataattattatcgcatatattgtagctagcaaataccataattgccatgagcaataattatctcctaataacacaacacgtaataaatatttttttaaagcagatgctatattcatcttttcttttatagtatataacatttcaaacggaagatagataatcgtccatactaagtacattttaattattttgtataaataatctttcaacacgacatatttttctgtgtcattctttttttcattcattttcttcttaaggaaaaatcctgatgtaataaaaaaaaatggaactgcctgtcttataaatatctcatacaaattaatcaaaatactgctcgtacaattatttaacggctttgtgtgaatagatataacaattatcgccattacaaacttcattatgtctatcataaaataagtgtctttttgtttgtcaagcaattttttttgcttacccttcatcacatttaatacttgattcattatatttaaaataatatcatttttcataagtgctaatattattatatataatccaaaaaaaattgcagcacttacaagcaatataattaccagattatctataactgaatatttattaaataaaattaatgccaccgatgaaagtgttacagctatgctatactgaagtaattcttttctgtctatcattatatccaaaaacaattttttcgaataaaaaatctgggtagacatctgggtaaattctgccaacacagttgctatagctgccccaattgcaccaaatctgtaaataaaaaacgcattaaatattatatctataattgcacctgttaaaacagccttgagaaataaattttctttattgttaggaatcagtatctgatttcctgttatatttgatattcctgaaaatattaacaccggcattataatagcaagacatatatatgaatttttgtattgatttcctcccagaaaaataacacattctttagcctgaaccataaaaaataatgttaaaggtaatacagtcatcaaaatcactgatattgatttttttaaggtagcattatatttatctttataatcgttattaatataaaatgataatcttggcagtaaaactacgcttacagaattaacaaccataattaaaatactttttatctttacggctattgaatagtaagcgacctgagtatttgttgatataaaccctaacataatagtatctaaattagtatatacatttatagctagaacggatgcaaacattatcagcatagattttacatgtttttttaacatttcaatttttacaattctaaagctgaaatatttcatagcatataaaaaattcactacattgcctataacataagaaaacaccataatgattatatatataataaaatccttttgtgtttttacaaacaaaaaaataaaaatcaatgatacagacttaaaaaaaagtgaacgtttcgtaatataatcatatttttccaatccataaaagaaccattctaatgaaaatggagatgaaagaatataaatcaaatataatataaatacacttgcattatttttaaattgagggataaatcccataaatatcgtcaataaaagcagcataattacagtagttgccacatttatcgtaaataattcagacactacctgtgatagtgaatcattattctctctttttattgctacacttctaacaccatatgttgaaattccaacagccgaaataattactatatagctcgcgaatgatgaaaaaaaagaatatatccccattccctcagtagataacactcttgaaacatacggaaatgtaattaacggaaaaacaacatttaataatgaatatatgatattcattaccacattcttttttatactattaactttcaattttattatcctctataaacacacttgatattgacaacgcaaatataaaaaatatcgtattccaaaaaagtccttcaagcaaaaagatttcaaagcttatcaaaaatatattaatacagcctattaactgttctttactcatttccttatttttgaacattttctttattacattaaatggaagccaaagaaaaataataacagctaatattccgccatctaaaagcattgttatatacatattgtctgtagtttctgtccacacccccatatttgacggaacaccattgcaccgcatccaattgtagctgtatccaacaccttttccaaaaattatctgtcttatattcattctctttaaatacaatacataatttttcaaaattcccagtctgaccccctgatctttcatagaaaattttgaagtaattgaagaatatatatttgcaaagattgcagatatatatttataatttaacaggcacaaaaccaacactatcaatccaaatattccgaaaattattatcttatttctggatatatatttctttttctgcgtttttcttatttgtgcactatttaaaaccttagataaaacaaaagcaataatcaatgctaccaacgctgttctgctctgtgtcaaatatatatttattattattacgattttatataatatatcataacctttctttttaaacggatatattaacgaaataacaaatgcagtatttaaataaacagcatatcctattgggtgctgaaaaattgaaaatattcttccttttaccttaagataatcctgataatatgaatttgaatcaataaatcttagtgtaaaattctgtctggttaaatattctataattccaaaaaaaatcaaaaagacagtaagagctctgataaacacataaaaacttcttatattttcttttgaagaaattatatagattgatattccgccaataacaaataagttgatgcaattattaatatagtaatatatattctgtatattatcatttgcataccctattgctgtaataatcgtcagatataacatcaatatgttgaaccagattgatatattattcaatctgattttatttaattttttcttatataaaaccacataaacaattgcaagtattccaactaaaacacctctggcagaataaaaattgaattgcattataatatatagcagaaaaatccccggtaggaaaaagtgttctgcttttaattttaacttcatttattttcctcttatctcattaacctttctttttattacagaaacactcgcttttaactcatcatacatttcttcatataaatttagaaaaaacaacctaattaagttatttccttctttgtattgaatctgtttccaattcatttttaaatataataaatcacttccatcataatcaacatcatatatattttttaataaatttatatcatgctttttaggatatctaaataaataatcaaatgtttttattgtttttacacttaatttcaaaggaacagtccgtttataatcgtgtacaaatctaatagcattttcttgtaaattttgtattagtgtattattattactttcctcctgctgtgatgcacatatcactagatactttccatcaatatcccgatcaaatctgaccgctgtacctgatggttcgaacataatatgctccagaagcaatgcatatctgttaaacttcattgtatatcttcctgataaattactgtcgcttatccagctaatgcatttatcctgtaatgcctctctgcattttcttgatttaacaaattgcacccctaatatttcaactgatatattattcttctgtaatattttttttatcatcatctgaccatttccattgatactgttattaaccaaaaaatttcttccatcaaagaagccttcttgtttcaaatatcctaaaagatattcgttctgtttttttaattcttctttaacatcatcaaatacttctttgaatacatcatcatatttcccatctaaaatatcttttctggaaatcatattaacatctctaaatttcttgtaatatttttcattatttcccacatataaaacattgagcaattctattattgaatatgtattcttgattggcaatgtgttaattaaatttgtcatgctacattctgcattaagcaatggaaaccgcaacaaattcttattaaggtaaatatattgtgttgtatcatcaggaaacatttctttgtatattttctgaattaaatatccctctcttgatacaaagaatactttttcataattatttcttgttttctgctcatgaagccagtcacaaaaagcatataataatggtccaactactgtataccctattcgatattcacttacatcttcacccctgtactcatttttaaaaatagcatcaagatgcttatatttaatagtattatttcttctctgatataaatcaatatccttggtacatattaatctggtttcagccttaatacctgctttttctgccatctttatatctgaatattcattatctccaaaatgaattatatctgatgatctcacacctaatatatctattactttcggaaagagtctaccgcttttctttgttactccctcctcgctggataaaaataatctgtatctgcatgtaattcctatttttcttagcattttctcaattgtatccctatccagatacatgtccgatacaatgattatttttttattacactcgctgcatttttgcataagttcaagcataggcgtattcggtatacaactattaatttctgtgtatttttctaaataacacaattctttttttatttcttcagtgtatggtaaggaattatatattttctccagcgttatttccctgtttttatctgaattccttaatttaatctcatatctaattctggtttctttgaaattacgaattttattatcatgctttttattatatatatattgaacaatatcaaaaacatcttctggtgataatactgttctaaaaagaagagtatcaaatatatcaaaagaaacatattcaaaatcatatattttcccccacattttctctatctgattcatgtaaaatttctccctttagctttactcttcttacctttataattattgtaagaaataaatctacttattagatatttcattcaaaataattttcatcttttcttttgtggctttcattgaaaaattattttcaaaatattttcggttatcaacacaaaatttttcaaattcttgctgatataattcagctattctgtttttaaattcctcaccggtattacattcacaatcacttatttcatcatatccaactaatgcttcttttgtacctaaaactcgctttccatacatcaaagcctctgccgtcttaactttcattcctgatcctgatatgataggtaaaactacaacatctgcttcattgtatatttgtgataaatcatctaccgttccaattatatttaaatttctatagtttttagtccattcttctttttttagctgctccattttatatcctgcaacattaaaagttatattatattcttctaattcagataaaacttcttcacaaaaccattttacagctataacattcacattccatgtatatgctcctacaaacaacagtctaagttcatttttgtttttatacagtttaacattttctttatatttgtcctccaatattattggaagatatgcgtcggcatctctatgtaaatatttttttagaaggcttccatctctctcatgtaatgtaattatatagtctgtcagttgtgaatcaattttttctgccttaatttcattattccaaattggcaaatacttaatgtcaaaattatctttcttcttttcattaattacatcagtaattatatcattgtacaatgtgagcgtttttacattgcatttattttttataatctttatcaatctaccagtttctgaatttccaaaaataactaaatcatatttttttttgtttataagattgacaaccatttttatatctttattacttatttgtgtaatatttccctgcaaaagatttctaagcttacttaaaattccctgataactttttaatcttaaaaccacatttgcattccattcagaagtatcaagctctgacaaaacaatatccagattttcatatccaacaatatcccgaattatttgcactgttgccattttatatgtatgtccaccatttatatctccattatatagcataatcaaatataaaattctcatgatattctccaaatactcctattcgtatattttcttaatttcatcccaaataataccagctgttttttcccaactatattgggctagtaccttcttcgtatctcccactttttgttgtaaaatgctactcagattaatatctgtataattagaaggatttatatagtgagcactatcgccataaattgatggcaaacaagatatattagaaataattataggtgtaccctcagctaatgcctccattggcggaattccaaacccctcatataatgacgggaataaaaaagccttgcattcactcattagacttttaacttctccatcagtaatataacccgtaaatataatattttcaggatactgctcttcataaatgtttttatcatagctttgttcacctgctataattatcttatcgaaaggattctgctttgccgcctctataatccatttcatgtttttatgaggtactctgcttcctaatgtaaaataaaattttttgctgaccaaattatatttgttaagtatagaatcatctctgtctattcttaacatgtgctgccatgcattacctgctacaacaactttctcagaattagtatgatatatatttataatatctcttttagaaaattcacttaccgtgaatataattttacttttctttaatgctctttttctctgataaagtttcaaaggttttataatataacggcgaaattttccaatatatgctgactcaactaattccggaatacaatcatgaacacatgttatatcatttttccctaaaggaaaagcctgtgttaaatctataagaataccatcttttttcttaacatatttaggcaatactagatttttccatatatttataggcttatccccaacttttataatctttatattattaatttttaagtcaatattgccatatactggtgtaacaatctcaacatcgctctgttcaacaattttatcaagttctaaaatcacctcggttgcatagcggcttactcctgcaaatgttttaaaagccccaaaatcaccatttattataattttctttttcattctaattatattcctttattatattatgataaaaattatttccatcgttatataactcatcatataatttatatgataatttatgaatattggacatacttattatatgtttatattttttgtcattatatttttctcctataacattcaacatctgatgacagtaatcactatttccatacggtatagtttctttaacttccatgtggttttcaactgcaatagttataaatatatatgtaaataaatattccataacatatttctgttttctccaatactcaaatgtcatatttcttacttctcttaatacaatattacccggattactatgtaacagccagttgctatacaatgctggattattaactaacccaaatgtatcctgaaacgcaaaaaattcactttcgcttatataagaaggcattttacctgtcatataaacggttgcatctatccatgtccccccataatgttccaacaaggaaaatctcagcaaatccgaaaatgctgccgtagacataattcctttttcttccttttccaaaatatactgaggaaactgtatatatttgcaataattatcatcagataaaactatcacctctccatcaatatatctttttactgatgatatacatgctttaacaatttcaggttgtgaatgttcgccttgtttccaatatatccagacaggttttttgcaaacgacatttccaaatttaagtccttctggattctggtttctatatttataatactttttctgtagaatatta

SEQ ID NO: 8502 - DNA, 29593 bp, Unknown
  gut microbiota DNA sequence
atctcatatctgaagccatctccctgaaatattggctcatacacctcaactcttgatgagtcttcgtaatgtacttcaaatcttcttgtaagccaccatggtgatggtgcaagaatatatcctttcgtacctgcaataacaagctggccttctgacttgacagctactccgttcttcgacaatgccatggcattatcatatgacatatacaccttggtatacaggtcaacaccattctcgtcatatattgtatcaaaatgtatgtccctatagtctgttccaagaagcttaattattggaagcagtgtataacttccgaattcaagaaatgctccgccatatgctgcatctgttctctctcttgaatcaatattggcaagtcttgtaaagcatgcttcaacatcacatacttttcctatcttgcctgactgcaccatattgataagctgaccgaaacccggacaataagcggtcttaacagcctccataagtacaagtctattatccattgcatactgataaaggctttgtgcttcagctttggtaaacgctgccggtttttcacataatacatgtttaccattttccaatgccttcctggcataatcataatgagtttcattcggtgaagctatatacacagcatctacctgttcaagaaatttctcatactctccactataattaggaatatcatgtctgttactgaatgcctgcgccttctgattttcaggattgtatgtacatgctatattaataccacttacatacttggcttctgatatgaatctcggggcaattctgcctgttccaacaattccaacattaacaattttaaacttattctttctctccaaagttgatgatatatctggtgttctttctagatatacaacctcacagaactgtttaagataatcaaatgttccaatccagtctgaaccaacggtaaatatatcaacaccatagcgctggatatcctctatcttctgcccatcatggtcctcaacaataatttcatctgcaaaccctgttttcctgacattctcgattctgtccattatagaatcaactacattaaccttacctcgtgcctcatcaaaatgttctgtagtaacacctactataaggtaatctcctaatgcctttgctctctgtaaaagcttgtaatgtccttcatgaaataaatcatatgtcccataggttattaccttcttcataagttaaattcctccaatatcttccgcttctatcttatcttcccattcatcctctgattcttctccaaaaaagtctgtaagttttttaatatacagctttcttatttcttctgactgtactataactttatctgcgtatacaactcctggcattgttacatacgcatccatgttagtatatgctctcatatcattctcatctatttcatctgttctgaaatatggaatatatataagtttctgtgtatgtgatgcaagattatatgaataaaacaccggatctgttgttcccgctgaattataattatcatacggatactggaatacaattacatccggattctcattcacataattgtaatcttctattggtgtaattgtaacatattccggatacattccgccatctatatatttctcaaaagtcccatcaatatttttataataatatggaacgcactgaactataactttaatatccttttcttgacaatatttcttatatatattgtccatcgtattccagttctctgctttatatgataaaaagagcactgtcttatgagtatctccattaaaatctttaattatcttttttgctttcctcattgcactgttttgctctttatactgtatataatcattatatgtatctttataatcattaaattgagtgccttcatctatacagtgttttttctgtttaacaaaaaaaggatattcatgtgtatcccagttatgaactggtatcatataatcaccgtattttatctttaatatggcatcatattcaacaggcactggtatctctgtattttcgaatggtactcttatctcttttctgtaatattctttaggaaacttataattcttatttccaagccacacatgcataagcgtaatatagtcagcttccttttccgtatataacccgctcagcttatcaaccaatataagaagctgctgtgctatactcttatttctatctactgttactccgcacaactcttccacctgacttaagcgcaattccaattctgccggagctttttccaaattaatttcattacatttattttcaatatttctcgccagtttttcgactgtccatactatatctattaaatcacactgaaacttatcatcttcttcatctgcagctatataatcaagtggaaatatatctattcctgcaacatatggaaatccatgaaatttttcaaggtgaatcccgtcacaattaatatttcgtccgttaataattctcgctatcgcattatcattatctgcatccgtattcatgtcgaatatctcatagccctctggcataatatcctttgcaacttttaagtatctgttatagtctggccttctcatacatatatccatatcgtcatcccatggtatgaatccatgatgtcttatagcgccaagaagcgttccccattctgcaaaatactgtattccattctctctgcatgccttatctacatcactaagcacctcaagctgtgcagcccatgcatgctttatatccgaagttacataaaatccttctcttacttcagcttcaaaatagttcttgtcaaactccataagtatattctcctagcagtatattgtttcatacggctataaacaaaaagagctggtgcaagcaccagctcttctgcttatagtagtaataattattaaccgagaagtgaaagtacaccctgtgtctgctgattagcctgtgcaagcatagactgtccagcctgtgaaaggatgttattcttgctgtactgtaccatctcatcagccatatctgtatcacggatacgtgattcagcagcctgtgtattctcagcattagtatcaaggttattgattgtgtgctcaagtctgttctggatagcaccaagctttgatctctgcttagatactgattcaatagcatcctgaatagactgcattgcagcacctgccttaacattagtacttacctctacagcgctaaccttcaagccctttgctgatactgcaagactaatcttaacatccattgtctgtccttcaagagcaccaacctgaagctttcctgaaaatccacctgttaataagtcctgcttattgaactgtgttgttgttgagattctgtcaagttcttcatttaactgttcaatctcatccttgatagactgtctgtcaactgatgtgttagtatcattagctgcctgtgttgcaagctcattcattctctgaaggattgaatgtgtctcattaagagcaccttcagctacctgaataagtgagataccatcctgagcattatcagatgccttgttaagacctctgatctggcttctcatcttctctgagattgaaagaccagctgcgtcatctccagcacggttaatcttgtaacctgatgataacttctctgttgacttctgaagtgcgcttgtaactacacccatctgtctgtttgtgttcattgctgataaattgtgttgtactaccataatattttcctccttgaaattatattgtgatacagcatccttgctgcatctggttatgctttacaggaaacgttccgttcccttgtactttatatatcggaccttagtcctaaaactttagtccgtaatataacttttttaataattattgcttggtgtccataaactgtggttcattgctcaccttgctcatattctgataatatgactttgccattgatgcactcctcttagcttccttatgctcctgacgctctctgcgaaacattgcctctaccttgactttgttgcgtgcttcctgaacctctatcttagctccaagctctgtaacttctgttataagctttttcataacagctatctcttctgtgtacatagccttattgttattgatttcatctcttactctgttaaagagtgcctgaaatccctcatcaagcctgtcaagtccatctatacagtcgccctttgctttcatgttagaatcaaatgcttcatcatcaagaacagtctctgaaagtatagcatcctgttcttcattgagttctacaattcttgtaagaatcttctttttcttgttaaggctgtctatcatcatctgaagataattagtagtcataattttctcctactggttagtgctttttgcacgtttcataacttctttccaggtatccctcatacctctgatttcatctaatgctctgttaagcacttctatatccttacttatattagcttctacaagaagagaatatatataatcatatatcttctcaaagtcctctgcaacagcatatttatgattaagagtaaccttaaattctgtgattatattttcagccttcttaatattaatattggctttctcgtaatctttcttctcaatagcaactatcgcaatattacagaatttaattgccccttcataaagcataagtgtaagttctgcaggactcgctgtaagaatcttattcctgttgtattcctgcgctatattctgattaaatgccatactttcctcattcccccacaagcttccatgcttatgtgattgttaatagatatcagctaaaaagacctgttaatgatgacgactgtgcattcatcttagcaagggctgattccatggctgagaacttgctataataataatcctcccatgttgtaaccttatcctctgcctcagatatctttgtattatattctgaatactgagtattcatctgcttatcattatatatagtgtaagcactgcttgtcgacgatgctgtcatcttactgccaagatctttataaagctgtgatgcgagctgtgaaaagaatgtaataactgtatctggatcacttgctatcattgacttaagcttatcggtattagccgatgtatatgtatcatccttattcccgtctatatggtacacaccagtctcattctctggagaattaaaatatccaagtgtagctattccaaaactagaaagtgaatatgacttatctcccaccttgaatgattttgccatatcattcttcatagtatcaagaacacttccaagtgttgaatcttttctaagaagtgaatccttaatcttttcttcccacttcttaacctcatcatcagacattgcatctttctcatcacttgtaagaggctcataacccttagaacttgccgcattgtaggcaacatctacagacttgacaaggtcattataatccttaaggaaacccttaatcatatcatatatgccatcaacatctgtatctgttgtaatagtcacctcatcagtacctgttacattcaatgcctgtatagtaagaccattaattgaataattattagtattattcgtaaatgtagcaccattaagtacaatctctgaatcctgacctgtgattcttactgctttagttgtatctgaagaagctgtcttatctatatcattagctgctgtcttggccatggcaattttagaatcaagtaatgccttagctttagcctgtctgtctgcattagtatcgcttacttcctgtactaccttctcattagtctcattcgctacagccttaccatcatcaccgattgttacataatccttagtatcctctataaccttggaattatcatcatacaccttaatcagtgattcattagacgcttttttctttaccgctgcctcatactcttccttgacaccatctttttccatagcctctgtgtcatattcgtacacaacattgccatcagaatctttaactgtattgccctctgaatccaccttttccttcttatacttatcataagcattaagcaaatctggtgtctctgtcttaagctttgccacatattcatctaatgtatatgaatgatcccatgtatcatctgctgccagtgcatcaagcttctccttggctgcattgtacttatcagcataactcttcgctgtatccttggcagtagccttggtatacatgctctcaagctctgtattataagcatcagtgccctctttcaatgcagcaagcctaatgtactcagccttgtcagtgtcattaacagtatatattcctaacgctttcaatgcattaagtccattagcatcattggctgtgagtgagaagtcattatccttgcccgattccttcgcacttataaagaaacgtccattattgtcatcaaaattagcattaagtccggcttcttttaatttagctgtaaactggcttacattcatatcctctgtgatatcaatgctctttattccagaactcgtctttacacttattgaaccatccttagttcctattatatcagataacttagttgagcctgtcaccttacttttatcagcagcagtaatcttaccacctgtaagatatcctgtagctgcaagatgattaaccttaagtctctgtgttccgcttaccgcagatgaacttgcagaaaccttggcatacttatcattagacactgttgatgtcttcagattataacttgtagaaaatcttgcacttgaaagctttcctgagtagaaaccatatatacttgtattcatggtcttccacttttcctgcttccatgaaagcttagtctgtgctttaacaagattatccttctttaacttatatgatgatacgagtgctgaaacaagtgattctgtatccatacccgataccataccagatagtcttattgccatagcttatctcctctcatctaccatgatacctgcaagctcccatgccttagcaagcatctcaagagctttctctgaaggtatttctttaataacttcgtctgtatctttatctttaatcttaattgtgattctgttagttggttcgttgtagccgaattcagcgattgtgttgttgttaagtaccttccttatatccttaacatcagccattgattcagcctgcttctttgccttgtcattgtcattagcgctgctgccattcttctcactgtctgctgcctgtcctacagaaactgctacattagatgctgctgacttcgctgaatcaacaacaacctcattgctcttatctgtagctgatgtaacactgcttacctgtgataccggcttagcagcctgtgaattctggctctggtagcttgacgctgccgctactccattaacttccattcccatgatacaattccacctccgtgtgaaaacaaaactttatcctgtagttacattcatgttgtactgcatatatcggaaaatgttaagtaaaatttaaccctttgggaaaaaatatacacaaataaaacaaatcatttcttaaataactggttaagagacttcacatcaaccgaacttgctgcttccttattagaatcaagtatctgtgcatacacttccttacgatatataggcactgacttaggagctgatatgccaagctttacctgatcgcccttgatttcgattattgtaatctcaatatcatcgttaataatgattgcttcgtctttctttcttgataatgcgagcatattagttctcctccttctttagaatatcgtatataggatatcttacctgatattcagaattatctgctataagctgtattcccttcatcgtatcaaaatcaacaataataggagctttaagattaattgtcatcttagtaatatcctgtggtaccgtaagcgcgcagtacactctgatattatcatcctgtatatcatctccgagagacttaagaagctcatcctcaacaacaggatcatatgtctcatacacgaattccggcttcatgactggaagtgcaagtgttggctcatcaatcgcctgaagccatataattgatatattctcctctttctctgcatcatacacaagagtatacttcttccagtcctcaaatccaatgattcccttgtcaaatgtaatgattttatcctcactaacctcaatttcaccaaaccatttagtctgtactttcatgtcaaacctccaaatcttaattctatccttatttcttcataagctttgcatactgcttatgctggctacccaagaaaatcaagcaatgtctgctgaacaaccttgctcgcagctgataatgctgcctgatatacaagctgtgctgatgtatatgtaacaacaatctcttccagatcaatgtcttcattctgagacttaagatcagtgaaattagtcttctgctctgtaagtcttgtcttggtaaggtcaagtcttatctgtctgttaccgacatcagccttcgcattagatacctgctcctgatagccctgcatctgaccgattcccgcttcaaaagcatctttcatcttagattttgcaaaatctctctgctttgtaaggccttccataatatcacttaacttcttctgtgaagcctcatcgctgtactgtccttccttctgcatagactcaatctttgatatctggtcattaatatcaaggacattctgtaccgcattgacaaggtcatcaacatttcttccaagatatatattgaaagcttcatcagcttctgtattaaccttaatcttctgcgaaaaattaatgatatattcaatatcctcactctgcttgttgtactcaattcccgtattattatcaacacagttaaaatacattgtcgggtcaatatcaccctttataaaattgctcttctcgtatgtcactgaaaatgcattatcagcatacactgacttgtatacattctcaccaagaagaagctctcctgttgttgagttaattgcaatctcattctctcccggaacataattaggttctgttgttgtaacaacatttacagcagtatcagctgtattaccgtctgcatcagttaccgtaatagtaagtcctccatctacagtaacactcccatcatcagcaatagttatattggcagaattattgtctcccatgctcattgaaaatgtttttccgttaatctcgtcatatgcaagctggattctgtgtacatctgttatattaggtgtgattatattgccgttagcatctgtctttacattaagattaataatatcgtcattagtatatgcattagtgtatgcagtcttattagataaatcctcccttgtaaagttctgtgtaattgtataatcaacatctttagcagtttcatctgactggtatgtcagaggcttatctgtagcatgtcctgtaaatacatatcttccggcataatcaacattcccctgctcataataagcttccaccagcttgttaagactttcagcaagagtgttacgctcagattctgaatatgaatccgtagaaccctgcacacagtaattatacagatcctgtataatcttgttgctttcgtctaatgcatcatgagttacacttaaccatgatgatgcatcaggaatattctttccaagatactgtgttacctcatcaagacttgaacgcagtctcaatgccctgatggctataatagggtcatcagaaggcttattaatctttttctgtgttgagagctgtgtacttaaatcattaagctggctcttatttccctgaatattggatattgagctgtttaccatcatctggttagtaatacgcatattatgcctccttatatcgcgaatcaaaaaccgcccctatggtgaggagaagaattcttttactattttatacacctgtattattaataagtctgtcatataactgattcatgacagtcatcatcttagagcttaaattatatgcctgctggaactttacaagatccatggcttcttcatctgtatcaacacccattacagataatctctggttctgtatagttgtcttaagattgttgtaattctttgtaaaattaattgccttacttgcatctattgacatatcactgacaatactttcgaggaaatatgttcccgtacctccgtcatatatcttagcatctttagaattgataaggtctacaatcaggcttgtattggcttctccatcgctttccttgtacttggtagcaagaaggtccgcgttatcaataagatcctgattaactgttacacttgacgctgtaagagccttgcttccatctgacattacaaaaagtggaattccgcttgccgagccatctgatgtaacaccctttgtaagaatctcattgattgatgatacaaatgtctgtataaactggttaagctgtgcctgataataagggactcccttataattagtattgctgtccaccttacttactgtatcagtaaggatattaccctctgcatctgtcttatatgtttcattgccatcatcgtcagttgttgtggcatatttttcaatctcaccattacatccgtctcttatatcaataagtccctttaactctccgcctaatgaagtgctgtatatgttaaatggctgtccggtctcccactgtatgtcatacagacctgccgcatctgatacatttcttggctcatctcttgaaacagtctgaagagtatggtaattatagccattaacaagcgaattaccattaattgtaatctgaaggtctgtaaggttattgccaatatctgtctcacttactgatatattaaccagcttggaaagatcatcaattaaagcatttctctgatccttaagatcgttggcattgccataattagcctgaatctggttaatctgcttattaagagaagaaatgctctgtgccagagaattaatctggttaacagtatctttaatctcattattagcgtctatctgaacattccttaaattagtagccagagtattaaaataatctgtcatgctctttgcattattgataagctggttctttgcggatgtatcagccggcgtaagatcaagctggttaagtgctgcaaagaaattctcatactcagttgaatatcccttaagtgtgaactcattgagataattctgtatctgtgacatgtatgtatccttaacattgtactgtccataattagtataattatttctgtacttctcatcatagtaagaatctctcgtctgattaattgcatcaacgataactcctgcaccaagtgttccatatttagcatatgaacgcaatgcctcaccagccttaatagaagctgtctccttcgtatatgcctggttattgatattagcaagattatgtgatgtaacattaatagatgtctgcgccgcctgcaatcctgtatatgcaattgttaatccaaaaaatgttgatgccatattatcctcctgtattaatcagcatttatatacgtccaagtgaagtaacgagatgttccagcatttcgcttactacattgacatatctcgatgctgcattatatgcctgctgatactttatcatcttctctaactcttcatcagaggatacaccctctgactgtagtctctggttatcataaccatcaaccatcgttgtctggttacctacataattataaagtgccttacccatagtggcatattcaccaatataattattgtagaatgacatgtaatccgacttcgcatacatgtccgggttaagggaagcgaatttctcatcccatatatccacgagttccttggctctgtcaaaatcttccttaccctgtacagtagaaagtggaatctttcctacattctgtgctgcttcaggattaatcttcagattgccaagcttatataatgattcataatctgtctcgttaagattgtttctaagatagattgtctctccattatcacctgtagtcttaatatatctgtctgttccaattcttgaaaacagttctgtaccaacagtcttattgtcatccataccgtatccagtcttgtccatgtcaagcataagatactcatatgaatcaaccggaaccgctgctccgcctgcactctcgtataatttctcaccagatgcatagctgtaagtaccatcaccgttatcagttccggtaacctctcttccgtatctgtcataaagaaccgccttatcaactgaattatatatgtatgtatctgcctgaatctcacttccatctgcattaagataaggattagtccttgtctcagttttctccggacacaagattccgttgattctttcaacaattccattaacaagcttatcgaatcccgccatagcgctaagaattgctgaaggctctacatatgtattgtagtattcctgctgctttgcatattcattataggcctgctgatatgctgtacggccttcctcagtactcatgtcataatcattgctgtcaggcgcaaccggaaccactgtataatctacaaccatattgcctcttgcaataataagtcccttaagctgtcccttatctgtatcatcagcattagacgccagcttgccatcttcataaacatctctttcatacgatggccatgtgggaataacaagtgttgttccctcgacaactcttgtactcatagctgtaagttcacctgatgttacaagaggaactccggctgcattaataatagtttccttattctctgattcataataagtaatatctatatatttgctgagttcatctattgccgcatctctctggtctcttaaatcattagctttctcaatacctggtgcttccaccttggcaatactcttattaagcttatatatctgtcctgcaagatcattaatcttattaaccatattactaacctgtgtattaagagttgtctggtaatccctgagtcccttatacacattttctgatttctctataaatgcagtcgcattctggataagtgatgaccttgcaactgtacttgtcggattcttggcaagttcgttaattgaatcatacagattggtaagatatgactcataagttacaccctgcatctcaccaaactgatcttctatctcctgaacagcattatactggctttcatagaatcctagtcttgaattctcattcctgtatgccaggtcaatatactgatctcttattcttcttacctcagatattgcaacaccaagtccatagcttgcataacttactttgtccttgctgttgacattgacatatgtagtatcagagaaagtaacctgctgtcttgtatatccggttgtgttaatattagacagattgtgtgctgttgtgttgagcgctgtctgagctgttttcaaaccgcttgctccaacaaacaatcctgccattccattagccataaggtcacctctttcttacttaattcataatcttatatgtatatcgtcatttttttaaaacaaaacaccccagagactaaaaaagccacatttccttagtaaaaatgtggctttcaatccaacacggacaaccccatctcacaataaatcatccgtgatattattcatattgtcttacatccgtggcatcctgatatgccatcagaatattactgcctggcatcaaagcttgtgcttcccatgccacctgtctcctcatacgctccctttccatagttagccgtctgtggagccatacttgcattcttcgcaagattaatctcaaaatcaatcatatccattgattccttaagcagcagtctgttattatcattaacctgcgtaagctggtttacagttttcttaagactcagatacgactgttctaaagcatcatgctctgcctgcttcttttctaacagtcttactatctgactcaccttaacctctgctgctgacagatgcagaatcttacatatatctgcaacacatgactgtctctccatctccagtctgttaagaatatcaataagcttctgctccttaccaaatatctcctgaagctgtccgacatctcccttaacaatagcggtagtcttattattagacaagtccaaaagctcagtatactgtctgttctcatcattcattatattaatcaaagaatctatcaaacttgccatctaataaaaccccactaaaatgttaatgttgaaatgttgttcagaatcttatctgcaacagcttctgaactgatgttgtaagttcctgctgccatacgtgccttaatatcagcaatcttgtcttctcgaacatcagaagccttacttactgctgtcctggctgtctgatatgttctggctgtgtcagaaatctcaaatttgtcactaaccgatgatgtcttagctgctgtcttagctttagaaatctggctggtctgatatatctgattaacagcattataagcatctatgcgcatattaaccgcctcactttccattaattaaagcagatactctcttgcttcatgtgtaagatatcggacagtttccgcaaatactttatacccgttttgaaaaaagcttattatttatcaagaaatctcatccttgccttttctcttctctctcttatcttatcagcatcaactgttgaagatctgcttccatacatgcttcccagtctgttagctaaatcgttcttacatctctcacaatatcttccggttcttatggtagctccgcatacttcgcatgcaataccaataggtgaatcatcactgaacgataatctttcttctcttatccactgttcaatctgtcttgtactgacatcgcaattctcagatatttctctcatatcagcccttggattatcctctatataatctttaacctcctgaaacttttcttcaagctttctcatgcattcaggacaaagtctgtacacaccacctatataattatataatcttccacagttcttacaattcttaacttccatagcttctccttgttaatcttctttatcaatctcgttaacaggtccagttactaaagcagctcatactttaaaatccgtctcccacacacagacttataccatatacctgtgacactcctgcgtctttaagtactgctgcacatgcatcaaatgttgctcctgttgtatatatgtcgtccacgattaatacttttctatatcttacaacttttcctcttacttgaaaagcattttgcagatttttaattctttcccgattacttagctccttcatgggctgagtcttaacaatccttacgagatattcctcatctaccggaatctgcatggctcttccaagtgcctgcgcaataagcccagcctggttaaacccacgctccttatatttcgaaatatgaatcggaacaggaattatcacatccggcgaccacatgcgtatcatcctgccacatctgtccgccatctgcttcgcatatattcctgcatattcctgcttgttataatatttaaatctgtatattgattccttgacattcttagaatattcatacaacgcacatgcctggtcatatacatgcttctgcctgctgcagtcactgcagtattctgtttcttcatctttcaccggcttaccacattttaaacaggcaggctcgcttacataatttatattatgcatgcagcttccacatatatctgcccttatccctccaacaaaaggtgccggctttccacacataggacacactggtggaagtaccgcattaactgcctccattaataccttcttataatccataatcccccattattgtcatcattatcacatataaacatatcaattatcattgtccgaaatcttcaatatgtctgatttcttcaatcctgtctgtgagtgaagaatatcgttttgactctgatacattgtcagccataagcctgaatatctcctcttccccaacgaggcacacacatttccttgctcttgtaactgccgtatacagaatattcctgttcatcagcattcttggtccctgcgacatcggaataataaccgccgggtactcacttccctgtgatttatgaaccgtaatcgcatacgcaagttcaagctcatcaagctgtgagaattcataagtaacgaatctgccatcttcgaatttcacagttacattctcatcaaatgtgcttattctctctataactccggtatccccgttaaaagcgcccgttccctgttctgttggaataccgtatctgcttcgtttttcccatgcaagctgataatcattcttaatctgcataaccttatcaccttcacggaaagtaacatcaccgacctgtctttcctgcttgacagcatcagccggattaagaaaatcctgcataatcttattaagacgttccaccccgacattggattttcgcgatggagtaagaatctgaaggtcatacacatcggcacctacatagtccggaagtttgtccttaataagcgttttcatcgcatttattatattgtctgcaccgtttctgtgaacaaagagaaaatccttgctgtacttgttaagtactacctcctcacccctgtttatcttatgggcattaataataatctcactctgtgccgcctgtctgaatatcctctccagcttaacaaccggaaaacatccggattctataatgtctttaagtacatttcccggacctacacttggaagctgatccacatcacctacaagaatcagtttcgttccaatcgaaacagctttaagaagtgaattcataatacttatgtctaccatcgacatctcatcaacgataataacatcagcctcgagcggattatcttcatttctctcaaagaacatagacagacctgctgccgccgattttctgtcaccatccggcacgccgccgcttatctctaacattctgtggatagtctgtgcctcatatccacaggcttctgtcattctcttggctgcacgtcccgtaggcgctgccagcctgatttccagaccttccagctcaaaatatttgattattgtattaatagttgtagtcttaccggttcccggaccgccagtaacaataacaagcccgtttcttactgctttcgcaacagcctctttctggatatcatcaagagttattccttctttatcctcaatccttgcaatcctgtcatctatgaatttctggtcttcctcaatctggacatcaagattattaagcatagctgcaacatttgcttccatgttgtaatacatacgggcatagacacattttacattgtccttaaccttgacaactatcttcttatccattgtcaggtccataagatatttgtcatagtcctggacatcaatcaaaagcagttcgttgacctgacgcacaagcttatcatacggaagatatgtgtgtccctgcattgtcgcctgattaagcacataaaacattccgcttttaatcctgaattcagaatcaatcttgattccgacacgcgaagcaatctcgtcagccgtcctaaaaccgacaccctctatgtcatcagcaagcctgtacggattctgttcaagaatgttataaatgtcgtttccataacgcttaaatattttgttggcaagattcatctggattccataacgctgaagaaacatcattgcttttctgatgtctttcttgtcaataagctggtttgctatatccatagctttagacatgcttattcctttaatctcagccagacgctccggttcttcttccataatcctgaatgtatcatctccaaatgtcttaactattcgttcagccatcttctcgccgatacccttgattgccccggagcttagataacgccttacggatgcagcatcatccggcgccctgaactcataagatgtgactttaaattgcatgtagtaaactgcatgcttaacaaattcgccttgtgcagtaataaattcacctgtgttgatatagcttaacactccaacacaggtgatttcctcatcatcatatacaatattaaaaaccgtatatccattgtcttcattcctgaagataatattctccacaaagccctctacatatttcacagactcgtaatccaatctgttatctcctttatgttaaatattattcctgctcatctgccttaggaatagactccgtagaataatttctcttcatctgttcataaagcgtctgtgctattccaagtcctttgccatgattagaatcagtcataagcttggcataagatgataccatctcatctccaaagtaacttcctaaagtattaagtgaagtatcctctgttccgccaatcccagccatagaggtaaacatattgctatcctcgtcttctgaatcaatcttagccatcttctccattgacttaagaacctgttcaacaaaataactttcaaaatccttgcatacagacataagttcatcgtctgatgccttagaataatcagtatctgtaagtttattagttaaagaacccgctttagaatcatacacatctgaataattcttactgctaagtcccgtaatagaatcactcatatactacaccccgcttatctcttaaggttattagcctgctccatcattgtatcagatgttgttatagccttagaacataattcatacgctctctgtgctgtaataagattaaccatctcagttgcaacctgaacattagatgattcaagatatgactgtcttaatgagctcttcttcccaactgcatcatacgcttcgttaagtgcagctcctgacgcctcagtctctgaaaggtagcttccaccaattttatccagtcctgctggattagaaaactgatataagccaatcttaataccgattggtgccggattgttagactcgtcaggatataaaaggttgccgtctgtatcaatagtaataagattagtcttataatctttaccattagcgtcctgtccaagaactatctctgcgccatctgcgctgagtacaggatatccttcagaagtactaagcattacaccttctgtagctgttgcccatgtaaaatgtccatttcttgtatacacagtctcgtcagtattagtatttcttactgcaaaaaaaccatctccattaattgcaaaatctgttttactgtcagttgcatttaatgcaccctgtgtatatattgatgttactgctgaaactcttgaaccaagtcctacctgtgctccaacaggtttattctctccgttggcagaagtagtcttcgcctgaagattctggtaaagcagagacttaaattgagtctgttcctgcttatatcctactgtattaacatttgccagattgttggcaatagtgtctacgcttgtctgctggctcatcattcctgatgcagcagtccacaatgatctcatcatgtcgtcagtcctccatatgtatatgcctaacagttgttactaaatctcagatatagataccatctttcctaacatctcatcgatagtattcataatcttctgattactttcaaaatctcttgcaatagatatcatatctaccatctctgttaccacattaatattggaagcctccaaatatccctgattaactgttgctgtagcatctgtctgtgttgcgccatctacagctctgtaaagattctcgccatatgcctcaacatagtcataattctcaaaatctacaagagcaaatctgtctacatactgtccgtcagcatatatttcgccactctcttctacagtcagtttttcaaagtctgtaggtaactgtatcggaccattctcgcccaatacaaaatcaccatccttggttaccagataaccttcacggttcatctggaaagatccgtccctggtataaagcgttgaagtttctccagctttgttagtgaaagaaatcgaaaacaatccacttccactcagcgcaaagtcaaatgtattgcctgtgttctggaaagagccctgatcccagcttctgaaggattctcctactttcgctccaagattcagagttccgatattctgattaatatagcccacagtttcatctttaactttgatgccataaacatctttaaacgactgtgtcgtaaggccttctttcttataacctgtggtagttgcattagccagattattagacactacatccagtctcttctgctgaactgtcaagccagagtacgctgtataaagcccttttaccatagcccgcctctttcttgataatatattcttccggcatagagattatccattctgccagaatgttaagaaacattagtaataattttattaaaaatgttccaggttacttaacttcgtctctatagcctgcaaggaactcaataaacttacctgtaccaatagcaacacatgtcattggatcttcggctgtcatagtattaattcctgtcttggcttcaattaaatcctcaagtcctgaaagaagacttccgcctcctgtaaggacaattcctctgtctgcaatatcagatgcaagttctggtggagtcttctcaagaacgctgtgaacagcttcaacaatctgtgaagttgcctctcttaaagcttcctctgtctcctctgagcttacctctacagtcttaggaagacctgttacaaggtttcttcctcgtacattcatagttgtaacttctgccttaggataagcagaaccaacttttatcttaatatcttctgcggttctttcaccaataagaagattatgcttctttctcatatatcttacgatagcttcatcaaaatcatcaccggcaatcttaatagaagtacttacaacagttcctcctaaagagataacagcaatatcagttgtaccaccacctatatcaacaatcatattaccgcatggtcttgaaatatcaatacctgcaccgatagctgctgcaataggctcttcaataatagcaacctctcttgcacctgcctgaagagtagcatcctcaaccgccttcttctcaacctcagtaacacctgaaggtacgcagacactgattctaggcttcttaagcattctcttaccgatagccttctggataaagtacttaagcatcttctcagttacagtgtaatcagagataacaccctgacgaagaggtcttacagcaacgatgttacctggtgttctaccaagcatcagtcttgcttcctcaccgatagccttaatcttattagtatccctgtcaaatgcaacaactgaaggctctttaagaacaacacctttgcctctgatgtacacaagaatacttgcagtacctaaatctataccaatatctgttgataacattataattcccctttcttataaaacaatgcggacctctgtctgtccgatatattcagataaaacataaaatcaaaagtcattagaagccatgtgtacccatggctaatcaccattatatacataaaaaaggaaatttaaaagccctaaataaaaaaaatctatctaaatatatatttttataaatattcaagaagcaatacgtcttgtaaatgtatatcggcattaatttgtgcctgcttaatattctgcccgcgaatttaaaaatattttgattttgagttacatacatattataatgtggtggattaggattataacttgcatatattaaggtaatattaaagttatttctgaatttaagtgtataggagattgctatgaatatccgtgtattagataaaaatgataaggctgcccttgaacagcttatatatactatagaaaatgctcttcctgttccggaatggtggattcctattgatgatattgaacgctcacatttctttgatgctgactggacatgcttcttaggtgcatttaatgacgataatgaacttgttgccgccagcgcccttttctttaatgaacatgaatttgctgaggaagctgaaaagctcggtctcgacattcgttctacaaatgtagctgaagtcggacgatgcatggttcaccctgacttccgcggtcacaaccttatgtgtgagcttaacaagcgcctctgttcaattgcccgcaaccgcggcatcgacacaatcctcgccgtagcccaccctgacaacatcgccagcaattcgtctttccgccgtctcggtgcagagcttaaggcaactgccactgtattcggttcttaccagaggaatatgtatattctgccgtagtaggtggtggcaacctataggtagtggatgtcgggcaaggcaggctgtcccagaagaaggcagcctgccttgcccgaccctttttattcacatatattgccgtggcacttgctcatgtaacctgcctgcaaccgcctacaattcttccttaaggcattcaagcaaccctttgcagcctgccagaacgtccctgtaggttgcctcaaaatctcccgtataccatggatctgccacatcaagtccgtttcccgcaaaagtaagcagtttatatatcttctcatccggatctccgcccgatatcctctgcatattgcggatattctcagtatccattccaataaggtaatcatattcctcataatcattcagagtcatctgcactgccctatgaggaatcactggaattccttctttctttaacttggcaactgtgccatgatgcaccccattaccaatctcctcgcggcttgtcgccgctgaattaatatagaacttatcagcaagtccctctttttcaactaaatatgtcataacgctttctgccatagtgcttcggcagatattgccgtggcagataaagagcacgcgaatactcatgttttttcctcctaaaaagccttattttgccgtaatttgccgtgttttgccactttcaaaaatgtacaaggtattgttacaatgccaagcgccattgatttttcgtacatatcttgacatatcgtggcaatataaggcaaatcgatacactcattcgtagtagaaacgtagtcaaaataaagtgtgttactactctgattttggtgggtgcatttgaaaccattgagccattttagggggttcatttttgcacccagggggtcaaatctaacgaaagggtatgcaggacacacccttgttggataactattttattaattggtcgcaaaatggtaaggaagccatcttcaattccctgttttaaactatatgtatatactggatttccaaagtaatcgatattagatattgtttcactttcctttggagttgcagtcataccaatttgtgttgcagaagtaaaatactcaagaaccttcctccaattactatcttcctttgcacttcctcgatggcactcgtctacaataataagattgaaatatccggctggaatttgtctgaaatgttcctcgtcattttgtcctaccatctgatgataaagcgcaaaattcacctcatgcgaaccaatattgttaagacattctttatctgaaaaatccactttataaattgttttttcaagtgacgcaaaatcctgcaaaatactctggtctaccaaaatgtttctatctgcgagataaaggattctactctttaagcctgatttgagcaaacgatatacaatctgaaatgcggtatatgttttgccagttccagttgccattacaagtagcaatctttgctgtccttttgcaatagcttctactgttctattaactgcatttctctgataatatctaggtggatatgttgactgcgaagaatagtatgactgattaacaatctttttctcctcatctgtaatcccatttccaccatttaattctgcataatatctagcaataagttcttcctgacttgggaacttatctaattcaatcaatgtctcttttccagttaagaaatcatgctcataaaaagcgtcaccatttgatacatacgcaaaaggcaagtccatcatctgagcataagtcattacctgttgcaagccgtgagaaaccgaatgattgttgtcctttgcctctacaacagcaatcggcttaccatcattcaaataaagcatataatcggcaaatttaggcttactacgtgccacaatgttgcctttaatattgatacgaccatctgttatcttggtctccattgtgatatgaccttgccagtttggttgaatcgctggtgttataaagtttaacttaatgtcttcttctgacatttgctttttacttaatactgccatatctatttaccccctttacaggtactttttctcggatccgttggtttcttggcatcttctggaacaagccacatatttcccttatgtacagcaccttctatacgcccctctatacataaggttgttactcttcttctcgaaacattccatttttctgcaatttctgaagttgataataattccatataatgcctccaatattacaaataccttaagttaatctacctttaattaaaaaatgatgaaacaatagcagaaactattcctgctacaatgatgcaccagaatatattacttttagttttcgacttcttttcaacactttttatattttcacctaagtaaaaaacgatagcaggaaaatattgctttattatccatgacagtgccgcactaatcaacagcataatcactactccaactgtgacggcagctactatagttgaattagacatcgttccatcatctgttttatgtgtaattaatacgttcaagttcgaaataaaacttaaaccccacaacaaaatacagatgtgcataaaagtgaatttagatgctgccgtgtacataaatgattgtttatgcttatcacaaaggtcatttacttttctttttatttcctctgatttgtcattattttcaacttcaaaacccatttctaacgtagatttatatccattaatgaatgccattgatggttcaatcctaatatagtttcctattccaaatccaattcccattgtctttatagcacggttagaaaaattgtcatatgatattaattctgaaacagattcaaactcaacctcatcaccatttataagttgtgcagaatatttaggtttttcaaaatattctcttaataattcatctatgtccttaaaaaatacatcattcacaataattgcagatttatatgataattttccacttactttcatataccaacacctcttttcatttgcatgaatatctcatttttattatattcccacggaggaatagtttcaacaaaaagataccttttaacgattacttcaatcttttaacgattgccctaacaatttaacgatatatcacaacattttaacgattactcctaacaatttaacgatttcatcaatgcctagaaatgcactgatttgccatgttttgctacctatcttgtatctatatcagagaaccttttaacgataagaagctccggcaaaatgccagagctcataactatttaacgaaacatactacagatatactatttgcattccgtcattcatagtgaaacagtagtcacgtgttattggaaaaagcaagatatgccgcgttttgccgcgatgtgcaacgtattattcaaatgtcacaggacattgccgtggcagatgaaaagtactcgtatcataaaattctcctgttctgaaatgccctgtaatgccgagttttgcgttattttatcggcttttctgagcatcgtatttcccctgttaataactacacttttgcaaaatacttcaaaatggtgcaattcaaagcaatgtgtagtagtcaaatcgtagtcagttaaggaggttcagactactgacgggggtgtgcattatttaacgaaagggggttctgaaatgggcatccacttgtattatcgtctacaaaaactaaagcataaagttttgatctgttgctttagtttcagttacacaaactgaatttcacattatcctccattcactgtaattgcaagccattcaccataaagtctttcattatttcgaaccatgagaagcacttcgtatcatatcaagattatgacttgctatatctcgtttcttcacaaaatctttgaaaaaagctttaaattcagctatctctttttctccatctcccaaatattgatatatcttatgcaacaacccaacggaaaaactgcatgcgagtccaaatgtactcccccctccttcagggttacgaatccatttcaacgaatatccaacttcatctacattcaaacccattgtagcattcaatccatgtgattcaaatgataatcctccataaattgcgtcataatatttttcataccctgtctctttcatcaaaccatagatgtttgttatattgctacatacctcataccactgaatatatacttttttcttttttctgctttgcttctttttggcatctaatttctcttttctagctatatccgtttcttgaaaaactgtttttgattttatcaatctctccaatgcttgccttttcttttcaagttttttacaatcattatcaaactcatcttttcctttttgagcaataattaatttcccatattcagattctgcattaaaatagatttcacttttatctagttcttggtaatgatgttctagataataggcagctgctcgtttttgtgtgtcatcttttaatataaactctagcccaactatattctcaatcaaagatcgtagtataatttgtgctggttcaaataaacttacagaatataaaacattaattgaatccaattgttccatgatttttcttataaataaaacaataacggtatcaacaaaatcatctattcttgaagttcccattgtcatttcattttcaatttctccaaatctagtaataactgaatccaatacacaacttgcttgttcaataatttttttaaccttatcattcttttccacatcaaagaacagattaccaaatacttttagatatgaattttgcataattcctcctaaattccatttttaaccatttcttctctccttatgacaagaagcatttctcgctttctgtacaactaattccaatttatttcataaaattggatctcctatttatatatattttctaaacgccttcttcatcttcatgcagacatccataatatactcaaactgctgtggccaggcattctgatcatcaaatttcacatctttttccacgataatacggcttgcctttctctccggcaattctctccaatcaagtgccaatcccatagcagattccacctcatctttatgtgaataaagacctttaaagagttccttatcatcatttatatataattcaactccaactttgtttctcttctgaatttgtgtaacactgatgtggcaagctgatgagccaatactgaaatccatccaatggtctgtattaggttttctcttattaaatgattttgcaaattcagcattctgaaaagcataatcattgaatgcattccaatattccagtctctgttgctgcgttggatttgtaagcgtagttttcttaatctcttttgtccaatcattcggtctttccactaccgtaaatgatggagcaatatcagaatcacctatctggaaaagctttcaaagtaaaataatatataagtcttttctgtctgttaatttcatctgtcaaattcttttttgagccattccacatactttgcttaatattaatttcatcataaaatggtacttgcaatctatatggaacattcaatgtcaaatctgatttatattttgctattcttttatcatctgaatcttcaagaaattttataatattcccccgtttcgtgtttgatattaatccataatttttatgaatatatttaactacttcttcaagattatcggtaactcctaacggacctagtctaaggttatattcggttaccatataccatgcatcagcaatcatttcattaatcaattcgtcaaatgtgaatctacacttagcactctctaccttctcaagaattgcctgaaaccagaaaaacttataacagtttgatgtgttctcgaacaacttacttaaatagcctatattgagttcatctgaatatggtaactgcataacactccttctttcgtataaatatttctacatatcctctcttatcttctcaatcaaggtaacatccgctggcagccactcaacctctccaatatgctccttaggcaaccattttgcgttctcatgctcttttaacaccagatctccgcttaatatctcacaccagaagcaacccattgaaagatggaaattaggataatcatattctatcgtgtcgattaaagctccaactttaatctctgtatctaattcttccataatctcacgttttaatgcttcctgtggagtctctccagcttctatcttaccacctggaaattcccagccctcattcagtatctccacagaaaatatataatctaatggctgcttatggacatttgcctcactctcattcattgcaagtctttcaaatgcatcctgtctttcctgttcgttagcatcaccattcaatgctattgtcctataaaatccccctgtatcgggattaactatattgttaaacttatgtgataattcctgtgtctctttgatactgctacagaatataagtcctttaaccttttctccactatatccatagtaatttgcctgctggattatatgtttcacacgttcatcgcttgtaagcatactgaaattacgattatctttatcatctccaactatagacaaatcagtaattccaaaataatggaacggacataacagattttcttccatggtctgctgcaaacatatctcataagcaatctgatgattaaataactcataaacatttctacatgcaacattgtcatcccgcttatcaggagttgctgtcattccaagccaaagcttaggcgaaaaatgtttcataatcttctgatatgtatcagcagttacatgatgtgcttcatccaacacaatacaatcaaatgcatccttatcatattgaagcaaatgctcatctcgatttaatgtctagaccgtagcaaatacataatcttcatcatattcatgatatccagcaccaactaaacccatagaaacagtttttgcaaataccttttcgtaagatttcttagtctgtcttgcaagctgtcccctatgaactaaaaataacactctcttaaatccaagttctttcattgcaaatgctgaagcataagttttacctgttccccgctcgtgtcaaaggtgtgaggagaagtttttaaatttatttaaaaatagatatggtattatacaagataggaaacactattatctataagcattatccctcaatcgaaaacggtggcaggatatgactcatgcttttcaatcacctttaggttacaccgttataaatctcactcaaaacgaaaatccgaacaatcttcccgaatcatcttctgcatctgtcaattctaccgctatttcagtttcagagatcttatatttatcatcatttggtatatcacttgacaaacacgtcagtatgtattgtatgttatattctcttgacactcgtctcaccaaatctaaatattttttttgttttctaggatctaatgactctaaacaaccatcatg

SEQ ID NO: 8503 - DNA, 92788 bp, Unknown
  gut microbiota DNA sequence
atttttggaacatcccattcattttaataaatagtaacttatcaccagtaaacaagcaacttaaagccacttttatctggttcagttttttaagcagtttggttcagttttggttcagataaaaaaccaaactgtactagtttacaccaatttacattaagtattagtatatacattttttgccaaaccgcttaaatactgcattctaatttcaagcaattatactattcgtatgattacattctgtcgtggaatgttctagtaataactgttgcaagtggtaataatctgatctttaatatgctgatagcatcttcacttataagtcttgcaccacttgtcgccaccataactgaatcaacaactatatttcctgctttatactctgtaagcttatctgctattacctgaatcagttcacctgaagcaaccattcctgtcttgacagcatccggatatatatctgtaaatataccatccagctgctctgctaaaaacttaggagatacctccattatatctgttacaccagtagtgttctgtgcagtcaggactgtgattgcactcatcgcatatacacgattagctgtcattgtctttatatctgcctatattccggtccctttttagtctttatataatctatgagccccgcctgttcaagctttttccttaatcttgtaacattaacagtcaacgtgttatcatctgctattttaacatcatatccccattttaataactgttcacatacattatcagctataatcctgtcatcctcaactattaatattttatatatagactcaccctgcttcaatgtgcttcatttattgtattattatttacaagctattacgttaagtatatattcatacattctcttagttgaagatatgcttaagtgttcctcagttgtatgaatatcaaaaatatcaggtcccattgatatgcagtcaagtccttctattttgcctgcaagtataccacattcaacacctgcatgaatagcctcaatagttggctttttaccatacatctgttcaaatatccttaccatgtcatcacgcagcttagaatccttcttatattcccatgctggatattcacctgtaaattcagcatttgccctgaatgcttcactaatgaatttgatctggctcttaagattctttaaagcagcccctacagaacttctaagtgagaatctaagacatatacctgattcatctagtgaaatcacaccaagattaagcgaagtttccacaagattatctatatcctggctcattctcattattccgttaggtaatgcctgtataagtgaaactgcccttgtgctatcttcatatgttattgcctctgtgctacacccctctgatatatctacaacacactttaagtctgcatcagatgtagcaaactcttcttttatctcttttgctacattctcaatagctgctttaacctctgctgtcttgtctgctgctacaataatctcagccatacattctcttggaatagcgttatcctttcttccaccgttaaacgctgcaagatatacattattgtctgtgataacatcccttaatattcttgacataagaacattcgcattacctctgcctttatctatttcaacacctgaatggcctcctgtcagtcctgataaagtaatactaagctttgttccagtaaccttatttttatcaagctttagtgtaactctgctactgcagccacctgcacagcttgcaagcatgattccttcttcttcactatccatattaagaagctttttgccctttaacatagatacatctatggaagaagcaccttccatgcctacttcctcagatactgtacacacgaactcaagacgtggatgtgcgatactgtcgtcatcaagtattgcaagtgcatatgcaacagctattccatcatcaccaccaagcgttgttcccttagcagatatgaaatcaccatttacctcaagatccagtccatcctcatccatattcttatcacaatcaggtgtcttctcgcataccatatccatatgtccctgaagtattataggtgctgcatcctcataaccctttgaggcttcctttattatgattacattgttaagtgaatcatgataatattcaagctttctttccttagcgaaatcaacaagataattgctgattttttcttccttatatgatggatgtgggatattacatatatcctcaaaaaaagaaaatacatttttaggttctaattcagataatactctcataacactgtctcctttaaaatatttataatctacaaatttattttattcatttgtttatctacttatttatcttgttcatatatacaataaactgattcttatgaagcagctttataaaataacacaatctctcatacagcggctccgctttatctccaaaatgctctttcacaagctgtcctatatcataaatacttcttacaccatctatgctatgccatacaaatgtaccgaaatcatctagttcgatgtaactatatctgggctttcgtgcaataagctgcgctattctgttaaaaatccccttattgtgtactttgacttctacatgaccttttttgttttccctgcattcgaacaacgaattatgctttggaacatagtctaagtaattatccttctgcttagccataaatcaagccttctcctttaatcctagaaaataaaaatctgccggcaaaataaccggcagactcattataacatattatttattattttgtcttcttttcttttttgttaataaatgctactaatgttgcaacaagacatgcaaagaatacaagtcctccgatattaccaagattaataatctttgatatattaataacatcgccaagagtatctgcaccaacaggaataatagcgaataccgctaaaaggataccaaccagtccttcaccggcaataagacctgatgaataaagtattccctgattaaccttagccttacgctcttcttctgtaatacctttcttcttatcaacgtaaagtcttacaagtccaccaaccataataggtgtacttaaatagattggaagataaagtcctactgcaaatggaagcacaggtatctgaagaatctcaactactattgcaattgcaactcctgcaaatacaagtgaccatggaaggctgttacccataacaccttcaacaaccatcttcataagagttgcctgtggtgctggtaattctgttgaaccatagccccatgctgcattaagtaaataaagtactccaccaactgtaatagctgatacagctacaccaataagttcaccagcctgctgcttgtaaggtgttgcacctactatataacctgtctttaaatcctgtgatgtatctcctgctatagcagcaattatacatattacagaaccaatacttatagccgcaaccatacccttcattccaacagcacctgttgccttaagaatcgctgatgaaataagaagtgtcgcaatagccatacctgatacagggttattggaactacctactaatccaaccatacgagatgatactgttgcaaaaaagaaaccaaatatgataatgataattgcactaagaagatttacaggaatagctgggattaaccacataataatagcaagtactccgattcctaatacaacaaacatcataggaatatccttagttaatcttgattctactccatctgccttcttaccatatcccttaagtgcctgcttaaatgtccttacaataagtggtaatgacttaattaagcttaaaataccaccagctgcaactgcaccggctccaatataacgtacataattagaccatatctgtgatggactcatctgtgaaactggaataagtgctggtccaatgatattatctccaccgaataatgcgattaatggcataatcataaaccatgcaacagaaccacctgcaagaaggtatgatgataccttaggtccacatatataaccaactcctaaaagtgcaggtaatacatctgcacctactgctgaacccttatatggtttaattgtaaaatcaacctcacttgggaacaccttaagtccatctgctataaacttataaacagcagcaataccaagacctgcaaatactgtgccagccttagcaccaccttcttcacctgcaactaatacctcagcacatgcctgtccttctggataaggtaacacaccatgctcctggactatcaatgcactacgaagtggaatcatgaataataccccaaggaaaccaccaattaatgcaataagcgctatctcaactaaagaaggcatagctgtaccttcctcctgcgcccacataaataatgctggaagtgtaaatatagcacctgctgcaaccgattcaccagcagagccaatagtctgtaccatgttattctctaatatggaatctcttcttaatataaagcggataattcccattgagataaccgctgctggtatggatgcagaaactgtcataccaactctaagtcctaaatatgcgttagcaccgccaaataatatagctaataaaacacctataataacagatgtaactgttaactcaggcataaccttatcagctggaatataaggcttgaactctttcttttcgttcatactctttctctctttcttaatattcttatgcaaaaatcgcatataatataatattattaaaaaaatataaaaatgtcaaatatctttcagatataaattgtaaaccgtaaatagtaaacatagctttattcctatgcaattcctgcaatcagaactttgcaaatatattagtactattcttaagattctgggcaatactcttgttttctatcattttattgctgatattgactatatcctcaacaagatcctgtgtgcttattcttcaaatttcacatcctgaagattatctctttgagctgtaattccatctgcacaccactcataggtatttgtaaatatctctggtgtatgaaccgtttcaaaaagataagttcgatctgcatttccataattgtcaagaacttcaagtagtttctgaattcctgctccaatactctctctattttcggctttgtcaatttcttttaaaatccgcagaatatctccttctcctgcaaggatattgtagttctgcctgttcaatatcctctttccataaatagatgttcatatcaaggctcatcgcgaagcactgactgatatctgtcgggtaatataccggatttttaccagaagaatagaagtcaaatctataagtgacataatttcactgataaataaaatgaataatgctactgaaattgaatgggatatagataatgaaaaggtaagtatttcatttaaaaacgaggatataaacaatagtctcaaagattacgccttagattatagatgtaaagatattaatatagaaaatgaatcttctgattctgaagcaactttaaccagacttatgcttattaacaacagtctaaagtaattattaactatttattttctatgtaatttcttacaacaacatatattttaattaaacttgttgcaaaatgttaatttataaatatcatgtctttaatccaaattttatgtcgtgaaaatttaacagctaataaaaaaaatagagtgcagattctaactgaatctgcactcatttttgttcagattataaatggtgcttattatatcttgttataacttaatatcgacttttcccagttttcatgcatctttgcagacattatagctggtccagtttttttctcaatttggtccagatttgatccagtttataaatgaaaatatactattttatggtaatttacattaaactgattttcttcaaatctctcaaacccacataaacactgtattataaaatctgaaaaaactcaaaaacagcaattacattctgtcgtggaatgttctgctgataacatccatctgctgttcctttgttaggtcgatgaacttaacagcgtatccagatacacgaattgtgaagttagcgtactctggcttttctggatgctccatagcatcaagaagcttatccttaccaaatacgttaacgttaaggtgatgagcaccctgatcgaaatatccgtccattacgttaacaaggttgttaactctctctgaatcatcatgtccaagagcatctgggttcattgtctgtgtattagagataccatcaagagcccactcatatggaagctttgtaagagagttaagtgaagcaagaagtccgttctgctctgcaccatagcttgggtttgcacctggagcaagtggtgtaccagccttacgtccgtctggcatgttacctgtaaacttaccatatactacattagatgtaattgtaaggatagatgttgttggctcagaatttctgtaagtatgtctcttcttaatcttgtcaaggaatgacttaagaagccatacagcgatattatcagctctgtcatcatcattaccatacttagggaagtctccctctgtcttaaatgccatagcaatacctgtctcaggatctctctctgatacagtaaccttagcatacttaatagctgaaagtgaatctactacatgtgagaatcctgcaatacctgttgcaaatgttctcttaacatctgtatcgataagagccatctcagcagcttcatagtagtacttatcatgcatataatggataaggttaagtacattaacataaagatctgctaaccaatccatcatcttatcaaacttagcaacaacttcatcatattcaagaacatctgaagtaactggcttataagctggtccaacctgaaccttagacttcatatctacaccaccattgatagcgtaaagtaagcacttagcaaggttagctctagctccgaagaactgcatttccttacctgtctgtgtagcagatacacaacagcagattgaataatcatctccccatgttaccttcataacatcatcgttctcatactggatagaagatgttgtaactgagatatgagcagcatacttcttgaagttctcaggaagtcttgatgaatataatactgtaaggtttggttctggtgaaggtcccatgttctcaagagtatgaaggaatctgtaatcgttcttagtaaccatagaacgtccatcaatacctgtaccaccaacctcaagagtagcccatgtaggatctcctgagaataattcattgtatgatgtgattcttgcgaacttaaccattctgcacttcataacaaaatgatcgataagttcctgtgcctcagcctctgtaatcttaccagcttcaagatccttattgatatagatatcaaggaatgtagaaacacgacctactgacatagcagcaccgttctgtgtcttaatagcagcaaggtaaccaaagtataaccactgaacagcttccttagctgttgtagctggctcagaaatatcatagccatatgcagcagccatagccttcattcccttaagagcgttaatctgatctgaaagctcttctcttaactggataacatcgttagtcataactccgcatccacagttagccttatcctcttccttgcacttgataagataatcaataccataaagagcaactcttctgtaatcacctacgatacgtccacgaccatatgtgtctggaaggcctgtgatgatatgagatcttcttgcagctctcatctctggtgtataagcatcgaatacaccctggttatgtgtcttatggtattctgtgaaaatcttgtgtaattcaggatctggtgtataaccatagttctcgcaagattcctcagccatcttaataccaccatatggcataaatgctctcttaagtggcttatctgtctgaagacctactacctgctcgagatccttcattgattcatctatatatcctgggccataagctgtaagacctgtaaccaccttagtttccatgtctaaaactccgcccttagctctctcttctttctgaagttcctgtaattttccccaaagcttattagttgcttctgttggacctgcaaggaaactctcatctccatcataaggtgtgtaattgttctgaatgaaatctcttacattgatttcttctttccaaagtcttcccttgaatccagcccactgtgtcttctcaaccatttgaattgatcctccttaaatataatatatttcaatgtacattttaagaaaaatgtatttctttttgtacactgtatacaatcttagtcaaaataaaaattgccatgtattataggatacttattgttcctataaatatacattgacaaatccataacaatttgaccatgattactctaacatgcttctgataataaatcaataggtttaacaagagtatttaattttgtacaatttaaggggaatatcgtgaaatattccccctttattaattcagtattcttcagtacttcaggctgtattaatgttatttaccaataaattccattacctggccttcacttataaaaccaacactctttgccacgcactctccactcttaaataaaagtaatgtaggaattgacataatattatatttctctgcaactgatgattcctcatccacattaatctttacaatctgaacatcatccaccttagctgcaacctgttcaagaactggtcctaacatcttacatggtccgcaccagtctgcccagaaatccacaagaaccggcttatccgctttaagtacctcattattgaattcacttgcttttacatgtttaatttccatagcttatctcctttacctataataattattatatcatatttctccgcatatattcaaatctttctcttctcatctccacaagcatctgcttaatattccactttttattagtatctgtcaatacagccttaaatgatacatcaaaactcttctgtctcatttcaaagagaagcttgtccatatgcttatctgtcacatcacaaaatacaacaagactctctttattttcttgtggctgatatccctctgcatctgataatgatatgcctcttacatcagctgcaatctctgccagagtccggtctgtatctgactcattaatgaatccgcttataattctcatattagatgctgctttaataatatcctgaggtctcttaacattatataacaatatcttttccaacattaattacccttctttgcccttcttttagcaataatttctttgatttcattaatagattctttatgtactctcgaaacagcattaggatttctcttaataatacttgtaatatggctgtatcttctatccgctctctcagataactgtcttctttcttcagccactgctgccatgaattgttcctttttcttattaaattcttcttctgcaaatgtggccgtaatctccattcttctggcatacatctgaagctgttcattctctttcgtaaatttctcaagtgtcgccttaaggtccatagcctcattaattgaaacagcaaaatctgctgccatgtatattgccagaactactgcaataatatctgctattgttcttggaatcataagtactgctgcttcgatgggcttgtgtattacacacacaagcaaaatagagaatgctccccatgcaagtgatataaagaaacatatatgccctttaaaattaagtggaagattgctgtaatcccagtatcttacaccaaaaagcttctccatgcagcagcctgtgcagaattcaagtattgtagatgataccattcctagaagaaagaccagtggaacaatatctttcactgcaatcgtactaatcaatattacaattgcccctgaaccatatattggcaggaatggaccatgcaggaaacctctgtttacccacttatgtttcctcacagaaacatagcagcattcccatatccaacctaaaaaacaatatataaagaaaaaaataagccattgcgatacagcgtaatatctcataagcatacctccatatttaatcaaatgagaatatgctatatatacctacttcagagtttcacagaatttattaataataagtgcccttctgtttctgctgatttcaatatatttgccatttcccactttcgcaagattcttcttaatgttagttatataagatatattaataagcactgactgattaatataatgaaatccctctgtaataagtactctgtagatttctacaagactacaatacaattcaatttctccagactcgcgtgaatacatagtaactcttctgccacctcttgcaaaatacattatgtccgcgaccctctccttatacacctttctcgaagattggtatacaaaataactttcattatcaatcttaattagttttatctccacgtaaattttctcctctcatatataattcttgcatgcccttctaattatatatgatatacaaaatatttcaatggaataattgcgcatcactatacacaatttggtcgaattttattatctctgataaactatctttcctgaagatatagtataatgtattttacctggtaattcccatccgataaaaggactattagatgcctttgatgcaaaatcttctttccttacggtccatagttctttttctccaaagataactaaatctgctgctgctcctttagtaatacttcccggtatcatacgatagaattcagcaggattcttactcattaattccataagcttcattaaagatatatgtcccggttctaccagtgatttgattccaagtgccagagatgtctccagacctgtaattccactaggtgcattttctaatggtctggccttctcttcatcactatgtggtgcatgatctgtcactatcatatcaatcgtaccatctttaataccttcaattatcttaattctgtcttcttccgttcttaatggcggattcattctggcattagttccatacttaagtaccgcatcttctgtaagagtaaaatgatgtggagttgcttcagcatgcacatcagcaccaagcttcttggcagttctgacaatttccactgaatttcctgagctaatatgctgtatacataccgatgctcctgtatgcaatgcaagaatacaatctcttgcaaccataacatcttctgctgtagcagatgcacctccatattcaagctgttcagcaactttcccctgattaactcctggtcttattataaactctggatcctcttcatgaagactgattggtaaatccaactctgctgccttcttcatggcctctacaagaacatgttcattcataatcggaattccatcatctgtaaatccaacagctcccgcattagcaagtgcttccatatctacaagttcaacaccttttaattccttagttacagacgctgtctgcaaaacatgaattcctgttgtctcaccttttttctgaatatactcaagagtttcaatattatcaactgctggtttagtattagccatgcagactacacttgtaaaaccaccttttgctgctgctgctgctccagtaataatatcctctttataagtaaatcctggatctctgaaatgtacatgtgtatccataagtcctggtgcaacaataagtccctctgcattaattacttctgcaccttccataacattaagattatatccagtttcctcaattatattattcttaataatgatatccataatctcatctgttttactgacaggatctacaactcttccacctttgattataatcaccgatgtatctttcgcattattatcatcattatcctgtatctccgtactttctaatactcctatatcttctaattttgttccacattcagaacagaataaggcatctgaattattagaaaaaccacatttattgcatctctttttaatttctgtctgctcattttttacagaaaattgcattgcagactccaatctggaaccgcagccaatacaaaatactgcatcaggtgttgtactacgcattccgcaaaccggacatatcttttcatctccaccactcacacatcctgtattctgtatatcagtctgcatctgcactggagctgtatacataacaggcggtgcttgatgtgtaacccgtactgtttctggttgctgtggctgtaccacatgtacctgtggctgcatattcgctctgcttactgcgggtacatctatagaatcagcatattcaccgagtatatcccatgtcatattctctggctgtttaagcagttcctttaaccttaccataaatgaaacatctgaattcataggtgttcttatcattctgagtatctcatcaagaaaaacattataaaattcaccattattgtaacctgtagctggataatacaaatataaagcctttcccgtagcagattcaattaatacagtatcaagtgaaaccataacattaccatattccatattatatgcagaaatgcctgctaatgcattgacactgctcctcataaatacagaaaaagtatgctggtctataaccctgttcttaaaaaactctttagctgtctcatatcccgctattccatactctgctgtaaatccattattatctgacactatatgaaaagggagaaatccttctacagctgtatttgaaagtaattcagccatattctgattaagctgttcatcttttgtactcttaaccttaacactcacctgattattcttggaaacaacctttacttttcccataaatgcatcctctcttcctaattatctgaattattatagatatatttcgtattatacatcacaattgctttatatgtcactcaaaagaaactatctttgcctttctgcttattattccattaatatacacaagaacatactccttataggttattgaatctcttgcatacataaatggttcttctctataaagcagacacttatatccctgtctctcatattcattcagatttgctattgcttttgcatgtatcacattatgaattttctgttcttctcttgaaaaagctctctgtggataacctgatgccgcttccctcaaatctgctattattgcatccacaaacgcagcatgtttcctcattccaaacattgccgccagctgtatacttcttaaccctgatggtttcttcttataagctttaagttttcttcttattgaattatcttcaactctctcagctatatctataagataatctacagcctcttcataaacacaatccgggtatgaaacataatactggtctggcacagactgaaatctcttaattggaggaaaatccgccagtttcataagcacacgttcagcatcattgcatacctcttctccaagatatctatacttatctcttatgtcagcaagctgatattcaagctggcgtaaatattcatatccttttatccagaaatgccccatactgccatagttaaataaatatgtccttaattccagtctgctgaattttattgtaaatatattcttattcccctgattaactataagcatatatccatcttttaacatctgcacagatggtatctgttcctcatccacatcaatatatttcccagtcataactgaatctttaaatacaagaaagctctccactgcatcattcataagataagcaacagcccagtctttctccccttccatgtgaacaggacagaatacattaagttcaaatacctgtgaaagtttaacgaacgcatcataatcagaatcacgcacgtcattaagcatatcatttttattatcttctgatacataatccacaattttactcatcaattacacatcccttaacataaagaattgcgttttactgaaactctgttacatgctttctcatccacactggcataagatttctctgacattcaggattatggcgatgcttaattgctatagtctcaaaaaagattttccacatatctgtatattcatcattcacatcttctgtctttgccagaactgacatatcataatctgtaaaatatcttatatacatctgcccatcagtagtatgaactacagacttttttctgttatcatcaattataagccagttctcagaaggcattctgtcagcaaaatgtaaagaaacttcatatataacatcgctctctggttcaagatgacacacatatactttgttatcaattgaattaaaccttgcaaactccgtaaaatatcttgtctcgtgcaaaaccttcctgcgtatatccttaattctcataacatcagggtcattcctcataaatgttatatctgatccaatcttaaatccttttatcagaaacctataggctgtatctaatgcatcctgttctgacgataaacatgcataatacacacatgcatatgcctcttcagatatcttatgttttattgagcgcactactttcttatactcttcttcattatactcaacatatatatattcatcgaataaagaaatctgttcttctccacgcttttcaagtctaacacatccatgacctactttcaaagccttctcccatgcatgatatatgcaacacatcatatcttcaaatgtattgtcacatgtaaatatatacataaacagacctccatataaaaactcttcattacatccatcatatataccaacactttctattcaaaaagtgaaagctgctgatacttttcattctgatgcgtaatctcccagttctccttgtgattatcatcagtcagacaagacgttatatatgactcctctattggtattctatacatcattcttccattacatgttataaaataatgtgctctcttaagtactacaccaatcttctttaatatatcaaaatcaagcttcgcatatcttctagtctccactattcgtctggcagacttaggaccgattccaggaattcttaaaagcatatcatatgatgcattctgtacttcgacaggaaactgtccaagatgtcttattgcccagtcacactttgggtcaagctgttcattaaaattaggtctgctctctgacaataattcatctgcctgaaatccatagaacctaagaagccagtctgcctgatataacctgtgttctcttaatagtggaacatctgcatccagctgtggcaatgcagaatcctcattaagtggtatataagcagaataaaatactcttttaagatcataattcttatataaatgctgcgtcgttctgataagcgtaagatcagtttccggtgtcgcgcctattatcatctgtgtactctgccctgcaggcgcaaatggacgctttacacacatatccttagagaccgccggaagcgataacttatctcctgattccaatgctgtcttctgtgttcctgataatgctgcttgaccgttatccgtcccattcttgttgaatatgcttcctgtcagatatctgttaatactgcttctttccattcgtgcatcttttcccaatgccagtctgttagccgcaattgtacctgtaatcttttccataggctcaagaatagtcttaaaactcttattaggagcaagcttcgaaaggctctgtgctgtaggcagttccagattaatacttaccctgtctgcaagatacccagcccttgaaagcagctcatctggtgctcccggtatagccttaacatgtatataaccattaaatctatacttagtccgtaaaagcatcagtgtttcacatattctttccatagtatatgacggattcttcaaaaccccagagcttaagaataatccttcaatataattacgcttataaaactctataacaagcctgcataattcatcaggtgtaaatgtagcccgcggcacatcattagagcatcggttcatgcagtatttgcaatcatacacacaatgattagtcattaaaatctttagaagcgaaatgcacctgccatcagcaccaaaactatgacatacaccgcatgccacgctgttcccaaggaagcctttctttcccttcctgtctactccacttgatgtacatgcaacatcatacttggcagcatctgccagaatttctaatttctccatagttgtaagatctgaatataattcgaacatatgtttattataaaaacatatgttctacatgtcaagcattttaatcaaaaaaataaagccataccttatcagtacggctccgtctttttcagaacaaatgcatcaactattttctttactgtggcaatttcttccgaactgcacatcttcaattcatcaattatatctatacttgctctatttccacgcatatttcctaacatcagataatctggcgttacattaagataattacatatatctacaaacaaagttatgctgcaattggttcttccaccttcaatattagaaagatatgtctgcgacacccccagctctttagccatttccgtctgttttatacgcatttcctttcttctctgcttaagcctgggtccaatatttataattcgttctttcataacttcctcacacgaactctttcaaattattgataaaattcattattatttcctgatctttctgagacatgctgtcaaatatataatcaagaagccggcctctgacatcatacagatttaaatacatagatgggacataaccatacaaatcgtaaagtcttataagaaccattgcatccggaagttccttattattctcaattttgctgtatttaaatcttgatattcccagattatctgatataacctgttggtcagttataccattgacatctctaatacattttaacatagaatccttagttgaatccttgtcaatagatttaagcagtctgatatactttacagtatcatctgaaaaatcagctatcttcttctcacacatataaagaatatgctcactcacaacgcctcttacatattccttctttgattcttcaccaaatgtctctatttctgaagaaatcacatacctgcatggcttttcatcgacatcaactaacatcttgtcaatatccgcccctgaatcagaaaattttctgaggtcaatgcctgacaccatgctccttcccgcttccctgttagaatactctggtgtagtcatgccaacccgcacagccattttcgcctgatcgtagtccattaattttctatatatgctcattcttttgcaaaatgctttgtaacgatctgtatactccatagcaacccctgtacattagtatgattactattaaattttagtatacgcacattccgcacatatatagcgtttgttgcgaattagattagtgcaaatgtttatgtgcaattaatgataatattttaattttaacatatcggaataagtttcttagtgtatagaataatatttgtgacagttaataaaaatgctgcataatatcactaaaatgcatttaagacattcaaaagtacagttgagacataagccatttaaaaatattttatatcaaatataattagtaatatcttaatgaaggaggaaaatgttatgaagaaaacaattaagtctgcattaagcaaaggcgtttctgccatgcttaaccgcactttaacttctggtgctaatgcttcatcaagctactattttagccagcctgttgagccagcatcattaaagaagtttaagaagacaagataatggtagagaaactttctcgccacatagctttatggcttataaaatcaggtatacttgagaatgatgacattgatttatacatatacgcaatacaatatttattattgattattaatccgacaattattttcacagcgtattgtatagccactcataatataacgattggactaatagaaatattttcgtttttgctcataagaaaatattgtggtggttatcattgtcagtcttctacggtgtgcctgattttttctgccataatacttattgtaatggcatggctttcttccttcattaagccatcattatacatgtttattgcacttgtaattgctgatgtggagttaattattaaaggtcctgtaatatctgttaaccactcagtatcagactcagagaaaaaatattaccaccgttgccttgtaggtattctggctgtttttaacattattattatcgcagctactgtcttacacctatatagaacagcaagctgcatatcaattgtaattattttctgctttatttcacatattgcatgtatgacagaaaaaaacaggaagctgtactattaattcatacagcttcctgttttctatatcataagtattattgatattgtaaattcattttcatcaaactgttcaatgtggcttcaatgatatttattgacaatcttatctatgctcttcattccatatccatgttttctgtcagaatccttcttaattgaaatgaaatttcctcctattattttaggtggaacagcacatgaatttacgcatttgataaatgttgtctcatgctttcttttaacaaccagttcaatatatttttcattaatttcctcacatttcttcgcagcttcatatgcattcgataatatattgccaaacaatgccactatatctgtggcaactatgtcatcaattgttcctggtcgtatatccacaacaaattctatattttctgtataacatttgctgctatattcgcttataagaccgtttagtacattattattagaaaatgtagttctcttcttaatattatactgttccataattgaagtaatataatccttcaaatcactattagtttccatacccagcattgtattaagatgattattcatatcgtgtcttaatatttcaagactttcgttcttctcattctcaagcttataatatcttgcgtctgccttttcctgttcaagttgaacctttattctctgtgtttcagcattacgctcatttattcttatattaacccacaaaactaatatatctgatgaaaccaaaaccatagagcttataactatccatactgtttccttacgattgaggctcaattcagattcaattatataatatgtaataaacaccaataaagatgctaacaaggatgctataagtaatactattgaaacatcaaaactttcaactgccttgcttttgtttctaataattaccattgtttcaacaaatatgaaatatactattttgcataatgatattacagctattataattgcaagttcttcttgcttaacatggcgtattccaataatatattcagttgaaaagaataccaactgctcagaaatagccatcattgcattataaatcaaagcccagaacactgccgaccttttgctcacattaaacagcagcgccattaatacaatatacattgagttgttaattgccgtaataaaatatatattccccgtcagaaacacgccaaacatcacagcatgtcctgccatgatagcaatgccggtcacccactgtttatatctgtgttcatacatctgcgacatactcatccacaatattatagcttctataatatgtgcaaatgcataactgattataatttccatatccacctactcctgccctgccagatacagaagcattttctgcttgaatgcagttcttttttctcttgataaatctattggttcttcgatgcccttaagctcaatatacttatcagtaaatcgctcaactctgtctatattaacaatgaaggatttattgacaagaaaaaatttatcctcatcaagaacactctgccaataagaaagacttttgagacttatgtacgactgcgtatctgttttgatatatctttttctaaccagtgactctatgcatataatcgaatcctgttcaataattacattatcacccttatattcaatattgattttcttgctctgactcttgctacataataataatgccttatgtaaacctcgcataatcacaggtctttccaatggtttattaatatacctgaaaactccctcgtccattgcatcatcaagatagcccatatacgaagttattatgaataacacaatattcttgttattatttcttaaacatttgccagcttcaattccattaattccgtccatctcaacatcaagaaatgcaatatcaatcttttcattattcttagctgcttcatcaccactgttatattcataaaccttataatccgttatcttatgatcagcaaagaattcatccacatattttcttatcatatcaatataaagcttatcatcatcacatattaatatattcatgcattatcctcttcacttaactaattaataattcaattatatcttgacaatacatgacatgcaatatcaataatctctttgacatctatgcataatttaatgaaaatacttattttctaatgttttaacataattatataatgcactgttatgtttttttaccgcataccagacatagtcatattgtattctgtctttacaaacctccagcttatgagatacgccattctcatcactaaatgtaatataacttgaccagccctgtgttggctcgaaatttttttgttttacctttgtatcatttaatttttcaataatattattacattcttcttttgatatatcatacacatttccggtacttcctgaggttattgtatatttggaagtgctttcatactttaaatccagcgatttgtatgaattattgttaatcaccatatacaacacgattcctataatgacaattcctataacacatgacactgttattataattttatttatctttttactcttcattcaaatacccccttattcttctgttattcacgaatctgtttctttaatttaactatacagaaatagatatatttttgcaatacatttttcaagtataattaacgcaaaaaaacgacagaaatttctttctgccgtttcactaacatatattatcaccctaagaagcctgctcaaactgcgaattataaaggtcagcatagaaaccgtttcttgcaagaagctcatcatgagttccctgctcaacgatatctccatccttcataacaagtatcacatcagcatctttgatggttgaaagtctgtgtgcaataacgaagcttgttctgcccttcatcagattatccatagccttctggattctctcctctgtccttgtatcaacagaagacgttgcttcatcaaggataagaattggattgtctgcaagtattgctctcgcaattgtaagaagctgcttctgtccctgtgaaacattgcttgcgtcctcgttaagctcacaatcatagccacccggaagtgtctcaataaagtgatgtgcattagctgccttggctgctgcaataacctcttcatcagttgcgtcaagctttccgtatctgatattctccataattgtacccttatagagccatgtatcctgaagaaccattccaaatgcgtctcttagttctcttctattaaaatccttaacattatgtccgtcaacaagaattgctccatcattaacatcgtaaaatcgcataagcagcttaacaatagtggtcttacctgcacctgtcggtcctacgatagcaaccttctgtccaggcttaacatttacactaaaattcttgatgatagtctggttctcattatatccgaatcttacatgctcgaaatcaacctcacccttaattccttctgtagaaacaggattcttaacagtctggtcttcctcttcttcatcaagaaattcaaatactctctcagaagctgctgccatagactgtacctgattgataacctgggcaatctgctggattggctgagtgaaattcttcacatactggataaatgcctgaatatcaccgattgttataacatttttaatagcaagaagaccaccggttaatgcaacacatgcgtaacctaagttacctacaaacatcatgattggctgcatcattcctgaaagaaactgtgacttccatgctgaaccgtagaggacatcattagtcttgttaaatgaatcaaccatatccttttctttattaaatgacttaacaatcatatgtccgccataagtctcctcaatctgtccgttaatatgtccaagatactcctgctgtgttttgaaatatccctgtgacttcttaacaacgaaagaaacaagtccgactgatattggaagtattataaccgcaataagtgtcataagcggtgaaatgcttaacatcataacaagaacaccaatcatagtagttaaagatgtaatgattgttgtaatactctggttaagtcccattccaagtgtatcaacatcgttagtaattcttgataacacctcaccatatgtcctgctctcgaaatacttcataggcatacggttaatcttctcgctgatttcttttcttaatctgtagcagaccttctgtgtaatgcctgtcattatccagccctgtacaaagttaaatactgcacttgcggcatacagacaaagcacgaatataagaattgttccaatctttccaaagtcaattccgccagttccaccgattttctttacaagaccttctgacaaagctgttgtcgccttaccaagaaccttcggacctacaacagaaaatactgttgaacatacagccataactgcaacaaatattatcgcaatcttatagcttccaatatatcttataagctttcctattgatcctttgaaatccttggctttctcaacaggtgccattcctcttcccggaggtcccattcttcttttcggtggcattttgatatctttattatcttccatactgactagacctcctttccaagctctttagcagaaagctgtgaacttgcaatctgctgatatgtctcacatgtcttcataagttcttcatgcgttcccttgccaacaatcttaccatcatccataacaagaatctgatctgcatgaaggattgtgctgattcgctgagctacaataataacagtggcatcagacacatttgcagcaagctccttacgaagaattgcgtcagtctttaaatcaagtgctgaaaaactgtcatcaaatataaacactcttgggtgctttgctattgctcttgcaatcgaaagtctctgcttctgaccacctgaaacattagtaccgccctgtgctataggactgtcatacttctcagccttattatcaatgaactcagttgcctgtgcaatctgtgctgccttaacgacatcttcatcgcttgcatcaggattaccgaatcttaaattacttgcaatagtaccagagaaaagcattcccttctgaggcacataaccaagctcacttcttaagtcatgcatagagatatttcttatatcatgaccatcaatagtaatgcttcctcctgtaacatcatacaatcttggaataagattaacgagcgttgactttccacagcccgtacttcctataattgctgtagtcttacccggctctgctttaaatgtaatatcctcaagtgcgttcgctttagcaccaggatacatgaaattaacatgattaaactcaatcacaccctttgcagactcaattgtctcaggattctcagagtcttctattgaagaatgtgtattaataacttcatctatacggtcagctgcaaccatcgctcttgggagcattacagacatcattgtaagcataaggaatgacataactatgagcatcgaatatgttataaatgcagtcatagaacctacctgcataactccggcatcaattctgtgtgcggcaacccacacgataagaactgacaaaccattcatgataaacatcatgcttggcatcatgaatgtcattgttctgttagtaaagagcattgtattagtaagcttcttattagcttcgtcaaatctttcctcttccttcttctctcttccaaaggctcttattacagaaagaccagtaagaatctctctggatacaagattgacattatcaaccagcttctgcataagcttgaacttaggcatcgcaattaccataagaagcattacaaatgcaatgataaccgcaacagccataactataacccagcccatgccggctcccgttccaacaacctttataattcctccaacaccaagaattggtgcatacagaatcattctcagcataataaccgtaaccatctgaacctgctgtacatcattagttgttcttgtgataagtgatgctgtagagaatttgtccatctcagcattagagaatcccatgacattagaatacagttttcctctcatatctcttgcaacgcctgcaccaactcttgatgcaaggaaacctatacatacagaagtaaccgccataagaagtgccatggcaaccatcttaagaccagctgcccacagatacttagtctggatagaatccatgtccattcctgccttggcatccatgctctttgcataagcaacgcccatagacgaaacaagagtctttcccatggtatcaatagtcttctggaattcgcttcgcatagaaaggatatcgtctttactcatagcccctgcactatacattgccttcactatctgtctcatatccacacatatagtttcaacctcattaccatccgaatcttccatcatctgtgtaaatgtaatgagttccacacccatagattttccaatatcttctaccgaaacatttgcaagctgttcttcacttacatgcatctgctctgccatacggctcttgaatgcactttcagtcactgaagacatctggttgttaattataagtgctgtaaaaagtgtgtcgtctaaatcagtcttattcttagaacctttgacacttaattcatagacattatcatcttcattataagaatacgactgttcccacagctgtgcttcttcctctgtcataaaaagcttcgcagtgtcatattcttccttggtaatcttttctggcacagtatgctctatgcctccattctgtatacctgtatcaatgatatctgaagtatacgcaggaagcgacaagtcacacactgcctgaacgataagcagcgcaaataccagcactatcgacttccagtatggcagcacatttttaataattctgctcataaacattctcccatctttattgataaatattttcaaaaaatctgctttcaataataaataagcgttttttataatatcactgattttcatcatagtaaattaatgtcaaatgtatttttataaataatttataaagaatgtttgaataataacaatatatatgttattatacgcgcgaacgtcatccgtttttcggagatgtatcttaacaagccggaagggctgcatacctttccgcaaaggagacaatatgaatactatcaatgcaactcgaacttctgcaacgaagttcaacactaagtacatggtggagctggcacttatggttgcggtcatactcgttatgtcactgaccccattaggctacatccgtacccctggactttctatcacccttttaactgttcctgtagctgtaggtgctatcatcttaggacctgtcggcggtttaatctgtggtctggcattcggacttacaagcttttatcagtgcttcgttggaggcgcaatgggaactgttcttctcggaattaatccatttggtacatttgtaacaacagtagtaacaagaactcttgaaggcttccttacaggacttatattcaagggacttcatagtattaagggagttaagaaattttcttattatatagcaagtctttgctgtcctttacttaatactttattattcatgagttcacttgttctcttcttctataatacagattatgtacaggccttcgttactgcactcggagctaagaacccacttatattcgtagtattatttgttggtgttcagggacttatagaggcaggtatctgctttattgttgccagtgtggtttcccgtgcattatatgctgcacttaagcttaaccagaattaaccagtcactttgattgaataaatcggacattaatcaacggaggattagttttgtttacagagatttcagttaatgatattaatgattttagattaggtcatgcttccaataaggaagctggcacaggtgtaactgttatatattttccagacggagcgacggcaggctgtgacataagcggcggcggtccggcatcaagagaaacgcctcttacaatgcctatgactgctgacaatccgattaatgccattgtactgtcaggcggttcagcatacggacttgccgcatctgacggagttatgacatgtcttgaagaacatggtataggatataacacaggagtttcacttgttccgcttgtatgtcagtcatgcatatttgatcttggatatggaagctctaaaatacgcccggacagtactatgggatatgaggcctgcattcaggcacttatgaaggccggtgttgtcaatactgatgcttccaccgctgccaattcggatagcagcgaacccattcagggctgtatcggtgccggaacaggtgcaactgtcggaaagattatgggaatgaagcaggctgaaaagtcaggacttggaatatattcagtgaaagccggcacatttacaatgacagcaattgttgttgtaaatgcacttggcgatatatcagattatgaaaccggtaaaaagcttgccggacttaagaacgctgacagaaccgagtatgtaagctgtgaagaagcactctatcagttcattgcacctcgcgatatgttcacaggcaacacaacaatcggtgcggttataactaacgctgcatttaacaaagctgaacttaacaaaattgcatctatggcaagaaatgcgtatgcacgctgcattaatccggtcggcacaatggcagacggagatacaatatatgctgcaagcactgcaaaacgaggcgacagcgaagcagtacgtgttgatatcaacttcgcaggaacacttgctgcccgcgttatgtccgctgcaattaagaatgctgtaatgaattccaaaatatctgatgaagaatttttaagcatggtaaagtaatacatgaaataatccccgataagctgctgttctggcagtcttaccggggattttttatattatatttatttttacattttaattattcacaaagcttagaaaatgcatccgcaacaaactgtaccttagttcctataataacctgtacagatgtctttccaggtttcataacaccagcaacaccagctgatttaataaccttatcattaacaagtgtaatatcctttacttcaagtctcagtcttgtaatacaattatctatgcttgcaatgttctcttttccgccacagccttcaagaattgtctttgcaattgttgtataatcgtcacttgcaagttcaactttcttttctgcttctatatcatcatcttctctgccaggagtctttaaatcccatttcttaatggcaaataagaatacgaaatagaatacgaagaatgctgctataccaagaggaattatcaaccatgtcttctgtgctgccggaagagatgatgagaataacaggtcagtagcacctgctgagaaactaaatcctgctctgaagcctaatgcaactgtaatcattgtaaaaataccataaagaagtgcatagataacatagagtccaggagcaaggaacatgaaaccaaattcaaatggttctgtaacaccacagataaatgcacataatgctgcagaagcaacaagtcctatagctacttttttcttagctggctttgcacatttaatcattgctaaagctgcacctggaataccaaacatcatacatgggaagaagcctgacatatacattccaagactccatgaaacatcacttgatgtttgtcctgcccagaagtgctgtaaatctccaagtccgatagtgtcaaaccagaatacgttgttcaacgcatggtgtaatccggtaggaattaacaatctgttcaagaatgcatagatacctgcaccaacaatatcaagctttacaattgccttaccaacgcttactaatgcgccgaacagtaatggccatacaaataataaaacaacagatacaagaattgatactactcctgaaacaattgctacgcatcgttttccactaaagaaagataaccagtttggtaattttgtatctttaaacttgttataacacatagcaccgattataccagcaagaataccaataaatggattctcaatcttgttaaatgcaagagttttagttgcactgtctgctatagaaggtataattactgtaacaaactttgtagaaagaagtgttgtcatcataagccacgaagcaagtgccgcaattcctccggtaccatcatttttatctgacatacctacaccgacaccaattacaaaaaggattgccatgttatcaattaaagctccaccagcttttacaagaaacagaccaatcatatcagctgcgcccttaatatctccaccctgtatagtttctggacacagcatataaccgatacccataaggataccacatataggcagtactgccacaggaagcattaacgcttttcccagtttttgaagaaatttcatacttttctcctcctttacatcattattaatcggggtaatcccaatcacgcacattgtgaagtccttagtaattatgatattttcaggacttcatcatcaatagatacctcaccctcctttattagattaattttattataatcgtcggtattgcatataaggactggtgtaatcgtatccaatcctgccgactttattttttcaagatcagcctctaaaagtaaatcacccttttttacctgctgaccacctgaaacatgtgaaataaatggttctcccttgagcgttaccgtatccagcccaatatgtatcaataattccgttccctgactggttgtcattgtcacagcatgaagagtatcaaacaccattgaaatctcaccatctgccggagcatatatctttccttcagaaggaattactgcaaatccatctccaagaaccttttctgaaaatgttggatctgaaacttcagtaattggcaccacttttcctttacatggagaataaataatattatcctttgactttcctttgaaaaaacctagcatattatctcctttccatcaatatatactctcttaatattcaattcatcatcaataagcacgaaatctgcttgttttcctacagaaatacttccgactttatcatatataccaatttcctttgccggattctctgttgcacacataacagctgtttctaatgaaatccctgcttttttaacgacatatcgaagacaatccattaaattagttgctgagccagcaattgttccatcatgtaaggttgccagattaccttttaccactacaggctgtcctccaagagtatattcgccatcctctaatcctgttgctctcatgctgtcactgattagtattatgcgtcccgcacccaacatggcaaatgttgcccgtattactgatggatgaatatgaactccatcacatatcagttctgcatgacattgatatgaatctcttattgcacctataacaccaggctttctatgattcatagggggcattgcattgtataaatgtgttgcatgagttgcaccatgttgaattgcctccatcgcagtatcataatccgctgctgtatgagcaatcgacaccacaacattatcttttactttatctatgaaatccatcgcacccggctcttctggtgcaatatcaacaatctttattaaatcatgtgcagctttctggagttcacagaaatactcataattacaatgcataatattctctgctgcctgtgcaccctttttttgtggacttataaaaggtccctccatattaattcctaccagatgggctccaccattatatgaatactctccggcattcttcataacttcaacaagttcttccttagctatcgtcatggttgccggacatatactcgtcaccccgacagaagcctcataccgggaaattatatcaagtgcctctttagttccatcacacatatctgcacccttgcatccatgaaaatgaatatcaacaagtccgggaatcatcttaagtcctgtagcatctacaacttcattgtcaacataatcaggggcttccagcactttggtgaatgtgccgttatctacaacgacatctcccttaacaaatacattatcctgtgtataaacatcaacattctttataatcatatcttcacaactttctattccccaagttaatatgctttaataaatcttactaagagcggcttcatctgctaccagtgttacatcattatgcagctgcagaactgatgcaggaacatatggtgtaatatgtccaaaaaaggcttctttcacaatctgtgctttatcttctccacttgcaacaaccagaatcttctttgcctgcattattgtcttgattcccattgtgtatgcctgtcttggaacatcttctgctgattcaaaaaacctcttattagcttctattgtagattctgttaaatcaacacaatgaacctgtttttcaaatgaatctgatggttcattaaatcctatgtgtccattatgacctattccaagaagttgtaaatcaataccaccaagagacttaatcagttcagaatatctgttacattctttttccgaatcctgctccattccattaggaatatgagtattatcaactgatatattcacattatcaaataaattcttatgcataaaataataataactctgatcattgtcctgactgagtcccttatactcatcaagattaatagtcttaactgctgaaaaatccaagtcaccttttttataccattctactaactgcttatataacccaactggcgttgaaccagtcgcaagtccaagtacacattccggcttcataataatctgtgctgatataatattagctgcctttctgctcatatcagcataatcttttgctttatatattttcatcacttatcactccatttcacatattctgctacgaacaccaagtaccattgatggcgatacactaagctcatctatacccatcttaataaatctctctgtaagagtagtatctgctccaagttctccacagattcctacccatttaccatgcttatgtgcaccctgtacggtcatctcaatcattctgagaactgcctcgtgatgcggattataaaatctgtccagtctgttattctgcctgtcaattgcaagtgtatactgtgtaaggtcattggtacctatactaaagaaatctacaagctctgccagttcctcacttagcataactgccgccggtgtctctatcataattccctgctctggaatctcatatggaatattctcattctccagttcctctgccacctcagcaacaatcttcttaatacttacaacttcttctacagaaataatcattggatacattatagataaattaccatatttagcagctcttaataatgctctcaactgtgttttgaatatatccggctgttccagacatattcttatggcacgataacccagcgcaggattatcctccttgccaagaccaagataatctgcttttttatctgctccaatatcaagtgtacgaataactacttttttatcagccatcatctgtaatacctgacgatatgcattaaactgttctgtttcgtccggaagttcatctcttccaagatacagaaactcacttctgaataatcctattccttcagcatcattttctaatacataagcaacatcagatacatttccaatgttcgcataaaggttaatctttctgccactctttgtgacggactctcttcctttataattagcaagcagctttttctgtttctgttccttctgctgggcttccttagcctgtgctatctgattctcatccggattcaggtagaaaattccattctgaccgtctacaattgcattaactccattgggtaaggattctaactcaattggtacaccaattaatgccggaatattcatcattcttgcaagaattgctgtatgggaattagccgaaccatgtacaagcacaaatgctaaaatcttattcttatccatctgtacagtttcactcggtgtcaaatcatctgccacaataattgatggctctgtgttttcccagtcaggctgctcttcaccgctcaaattgctcaccagacgattagatatatcctttacatccgctgaacgtgccctcatgtaatcatcatccatattagcaaacatgtcagcaaaattatctcctgttattgacaccgcatattctgcattaacattctcattgcatatcatattatgaatagcatcctgataatcttcatcttcaagcattatctgatgcacttcaaatatctctgcattgactttaccaacctcctttaatgccttatcatacagtctggcaagctgttgaagcgtcttttctttagctttgtccaaacgtcttaattcttcatcaacattctcaacatgtacacgcttaatcagactttcacttttctttaggacattaactggtccgatagcagtacccttatatactgattttccaatatatttctccatattctaccctctcagattctaataataaacattccccaaatatacaaatatttattatattaactaaaatgtactgatttccatgtattaaattgtcgttcgctttattatgtttacatattaacaattttttaacaatatgtccagcattatttgtcacattttaataaattgtgtatttttattaatacattgcagattaaaaggcaataaaaaagactaaccagccagtgtaatttataatacaacgctgattagtccatattagtatttctatctgtccgcatttttcaacttatgattaacagccatcgcaaccacaccaagtaacacaatgaaaagtgagataaactgcgatgtagagaatattccgatctcacctctgtaatcgtttcttaagaactcaattgcaaatctcccaagtccgtaggttatacaatataagaatccgatattacctgctgccatatgctttccggcagtttccttaccgtcagccttgcgcttcataacagcagtataagaaaacttagctgctattatcataagaaacgccatattaaggaaatctgcccccgatgatataagctgtgtaggaatcagtttaactcctgatggtgcaagtgaaccagccggaaagacaactccccaggctgcatctgtctgtcttccataacagcaccctgcaaggaaacagccgattcgtccaaagccctgtgccagcgctatctctggcattaccaggtcaaaatattcaaggaatgataacttcttaatctttacatatataaggttgcacagtacacctgcaataagtccgccatatacaacgaatcccgatgagccaagcacacctataggatcttctataaaatccttaaagctcactattatatacaacagctttgctccgagaaatcccgatactcccgcaattatcgcaatatcaataagagcctcctctttcattcccattttcttagccctgtactcaccaacaagcagtgccagcacaaaacctatgccaatcatcagtccataaccgtgaattacgaactttcctatatgaaataaatctgtcttcataaaatcaatcttcctttctgtcacctgtgaaccaatcctacatcagtcccagcttttccttagccatcgcaagtcttctgtcaaattctgcataaaatgccttatcatcagcacatccggcatatgtcgtcatatagaacactcttaagttaaatgtattaagaatcttcacattattctctgaaagtcccggcagcgccgcctgaagcagcttcacatactcatgccatctgacaatataagaatcatactccacaagtccctcaatgccaagccattttttcagtttaatcttcgatagattatccttattacactcgcccttctgcacaatatatttaaaatgtgtctcatcctcccagtatcttccaagtgggaacattctgcatattcccggtcttatcgtatgtatattgcacagattatcttcacgaagaaaagcacatcttccgtctgatttctgcatttttaaattaggcataataataccatccacaacatttaactcaagctcgttcatcgtaagctgttcaaatgttttccctaatccggttgtgagcttgtaacagtcatatgggtcaatcacaatcgtacttcccatattctggcagcatacagtctgacagcccttacacgagttagtatcaacacgcacaaggtcattctcggtatacattctgccatccgatatatcttctaatgaaacatttcttaacattattcaatcctttcaaacgtgtacaaaagattataaatcttcacgcacatatttacttcacatgtaactatagtaaaaaatatgtatcaaatcaagaacattttactcccatttttcgccataatgtgctaaaatacattcttgtatatttattttaggaaatctgatattgagaaaggattaagaaaaatgaaagataagattgttacatttggtgaaattatgcttcgtctctctcctgagaacaacgcaagatttactcagtgcaatgcatttgaggctgtttatggaggtggagaagccaatactgctgtgtcccttgctaactttgatgttgatgctaattatgtaacaaagcttccaaaacatataatcggacaggctgcaatcaactcactccgtcagtacggcgtaggcgtagaccatatcgtgcgtggcggcgaccagattggtatctacttccttgagaagaagacaagccagcgtccaactaacgttatctataacagagcaggttctgcatttgctctcgctactgctgatgactttgactgggacgagatatttgatggtgcaacatggttccatttttcaggaatcacacctgcaatctctgatgagatgactaacatctgtatcacagcctgccagaaggctaaggaaaaaggcatgactgtaagctgtgacttaaactacagaagcaagctctggtcaagtgaaaaggcttgcgaggcaatgtctcgtatctgccagtatgttgatgtatgtatcgctaacgaagatgacgctatcggtatcttctctatgaatcctgccgacgctaatggcgaggagaaaaatgcttacattgccaaggaacttatgaagaaattcccattcaagatggttgcttcagtatggagaacagaaacttctatcacaacatttaagctccagtctatgatttacacagaaggcaaggcttactacagcaaggaattcttcatgcacattcttgattacatcggtgccggagacgcttactgtgctggtcttatctacagccttattaacaacttcgatcctcagaaggccgttgaattctctaatgctgcaagctgcttaaagcatacggtaagtggagattacaacttagttacagttgacgaagttatgaagctcgctttctctgacgctggtaacgaagttcagagataattaatatcgcaaaaaacagtaccaccaatcttaattcaaaaagattagtgatactgtttttttatgccattgtatcaatttttgtcttgtctgaaaaagttttaagactaatttaaaaatataatgcataatataagtgtaataattctattcaaagttctaatatataacttttaagatattttattttgctgattttatcagttataacttataaaaccagtaaatatcatttgaaaatcaattataaatgtgttaaattatcattagttataaaaaaggaggttatctttcatggttaaacgagaaatgtatatgaaacgcatccgcccttttattggaacagaccttataaaagtaatgactggtatccgacgctgcggcaaatcagttatgttagacctgattaaggaagaactgactgcgtcaggaatacatccgacacaatttatctcaataaactttgaagatttgaactattctcatctgcagactgcaaaggctttgcatgatgagattaccaatcgttctaaaaccataaacggtaaaatctacctctttttcgatgaaattcaggaagttgaagattgggagaaatgcattaactctctgcgtgttacacttgattgtgatatctatattactggttcaaatgctaagcttttatctggtgaactttccacatatcttggtggacgctatgtagaatttgtaatatatccattttcttttgcagagtttctggaactataccgcccaattgctcctaatgaatcaattcagcaatatttccagaagtatctaatctctggaggtatgccataccttgcaaatatacgatatcaagaagatgcagccagactttatcttcacgatctctttaattctgttcagctaaaagatattgttaagcgcaacaaaattcgtgatgtggacctgttggagcgcatcatttcttatgtaattgccaatgtaggaacaaccttttctgccaattcacttgccagatttctcaagaatgaacaccgtaccgttgcaccagaaacaattctgaactatataaaatactgctgcgatgcttatctgttttatcaggttaagcgtgaagatttacaaggaaagcagattctttcctctaatgagaaatattatattgccgaccacggcatccgtgaagcagtatttggcagcaatatgcgcgatatcaatcttattttggaaaatatcgtctaccttgaacttatgcgccgcaattataatgtaactgttggacgaactggcgataaagaaatcgactttgtttgtgacaagcaaggagaaaaactgtatattcaggtatgctatcttcttgcttcagaagaaacaatccagcgtgaattcggtgtttacgataatatccgtgacaactatcctaaatatgttgtttctcttgatgaatttgacatgagccgcaacggaattaagcaccgcaatatccgtgattttcttttagcagacaaatggaattaaaattccacattttcttaatatatgaaaaaaggattggagacttctcacaatctccaatccttctaaatcatcatatattcatttcctaaggcttatccccatacttcttcagcaatttccttgacaagctttaacttagcccactgctcttcctcagtaagcttatttccaatctcgcatgaagcgaatccacactgtgggctcagatacagtctgtcgagtggaacatattttgctgcctcatgaattctgttaataacaagttccttgttttcaagcgctggtgtcttagttgtaacaagtccaagaacaaccttcttgtccccggatacctttgctaatggtgcaaatccgcctgaacgctcatcatcatattcaagataataagcattaacattttcctctccgaaaagcagatcagcaacgctgtcatatgctccagaactgaagaatgtcgaatgataattgcctctgcacacatgtgtattgataagcaggtcatctggtgcagcagctacaacctcgttgtttaacttaagcataagcttcttgtactcttcaagagcctcaccgcttcttcctgtaagtgcaacagcaagctttggattgaccattccgccccatacacaatcatcaaactggagatttctacagcctgctgcatatatttcagcaacaaattcattgtaagccttaattacatcttctgcaaatgcttcctctgttccatagattgcaagtgtatctgctaaaagctctgcacccgtaaaatatgcatagaactgtcccggtgaaggaattgtctgctttgcaacagtgttctcatcctctaatgccttaacgaatttaaaatgttcaacaaatggatggctctttactgatattttaccaaccatatatgtatcatcaatcattgctgcttctgcgtcaaatgttgtattaccatcaactgtctttctatgctcaacgccattgaagccccacatgaaatcaagatgccatgtagaccttctgaattctccatcagttataacatgatatccaagttccttaacctttgctacaagctctcttatgcagtcatcttcaactgctgtaagctcttcctgcttaatctttccactttcatagtcggctcttgccttctttaatctttctggtcttaaaaagcttcccacataatcatatctgaaaggtgtatttaatgtactcatgtatatcctcctgttataaatcaattgtgaggataattgtatcagatgtgatttgatatttataatacatttttattgtggttagcaatagctttaagctatggctagttttgctttatgaccttatttacaggtgtgttcacatactgaaagaagccgttatggatccatccttctgataaaaccataaaataaggcagccccacatagctgagtctgccttactttctttatttaatgttgatgccactggcatattgctgcagaaactgtttctttccacatggtcttcccaaataatatccctgcagataatcaaccttcatttctttcattttcagaagccattctttttcctcgatgccttctgcgcatatcctgacgttaatactatgtaccatggggatgatatttttatataattcataatccctgtcactgttcatcgccttggcagtaaaatccctatccattttcacgtaacttggattcatatcacggatacaatgaagattcgaatatcctgttccaaaatcatcgatcacaaagggaatcccgttcttgtccagagttttacggaatttacagaacgaaggtgtcatatccataaatccgctttctgtcatttcaacacataagcattccggctgtaatgaatatttttgaattgcatccagaatatcccgctccacattgccttgcaggatctgaacataggatacatttacattcatccggaagtcaggaatatatttctgcatttcacagcacattgctgcagcttcgttcaaaatatatcttccagcgggaatgattaatccggtctcttccaataatgggataaactccaccggtgaaacaaactcccgcccttcttccgttatcatggaaaaacgcatcagtgcctctgctccaatgatctgttcggactgacagtccacgatcggctggtagtatacttcaaagccatcataatggttcacaatagcattacgaagtgttgctatgattcttcctttatgtaaaaagacctcatagtcatcctggtcaaaaatataaaatccatttttacccatgctttttgcctgtttcaaggcaaattcaaactttttgcggcattcttcggttccctcacaaaatgttgctgcatctataacaccaatagaaatagaaaatatagcttcatatttttcgtctactatgaaattatgaagtttatctttaatcttttctttcagtgccacagcttcttctgcagaggaagcttccagatccacgatcacatactgatccgctaccagatgataaattctctgcttgtctgaaaggcattccttcatgcagccggctacgcttttcagaatataattaccataatccgctcccctggagctattgattgctccaaaatcatcaattcctatatgcataaaaaaacccttggtaatgggttctttttgttcacgcaggtaagtaaggaattctggaccaccaagcagtccggtgacattatcagcccttctcttgttgccggtctcattcagacacccgaccagatattccgcatttccctgctgatcattgataacgataccacggctgttgatccagaccggcataccttctttatcaagccatctataatgaagattatgtaccttttctcttccttcacatatatccgcaagatgctttgcaagcatctcacggtcttcttcatatactaccttcataacttcatttgacatatctgtcaggatattactcggtatattaaatcgttccacagctgactgtgaaatctcaaaggtattattctgcagatcaaatatatacagataatcgtccatacattctgtaatgatctcaaataaaatatcagctgtctgctctccaaataatttaaatatatcattaatcacaacaataaccttccttatgactacttcactctattcctgtcattttctagaataacttaaagatattcacgcggtcctgcatcttggctgctccctctgccagattaatactgatcgcagtattctcttctgaagatgctgcattgccctgtaccacaccggacagctgttcaattccctgaccgatctgttccaatgactctgcctgggagtttgctttctccatggtgttctgtgcaatctctgcaaaggactccatatctgcaatgatctgattgaatgcgtctgctgttgttcttgtaatcgtattgccattttcgatttccactaaggtcttatcgatcagatttcttgtatttacagcagattttgcactgtctgctgccagcttgccgatttgatctgccactactgcaaagccttttcctgcttctcctgctctggcagcttcaatggaagcattcagggataacaggttggtctgggatgcaatatcctcgatatctgtgataatattaccgatctccttggagatttctgtaatgtgctccatttccatcagcagatcgttcattttttctttttcttcgttcgctttatctgcagaagcttttacacgtgcagatgcgctctgcgtttccttcgctgtatctgccgccagatccacgaccgtatcaatggtggcattcaattcctcgatgactcctgcctgctctgttgcaccgtccgccagggattttgatgcattttccacctcggatgcattcgatgatacctgttctgccagattgctaatctcggtcagggtactgttaaaccgtttcagaatatacagcagtgataccttcaattccgagaaatcgcctaggaaatctgtaatatcatcaccatttctggtcaggtcaccctgcgctattgcctttacctccacagagatctcgctgacataatctgccagaatacccatggcttctttcagattcttgatggtatcgccaagctcatcctcagactcataggtaagcatttctacattagacagttcacccttacgcaggctggcaactgctgcatctatctgttctaccggctcagtaatggaattggtaatgatccttccaatcagtgtcgtcactacagcaatcgcaagacccacaaccacgatcacgacaaatatgatgatggtgcatacattggccatggtctttgccttatctaattctacctggaactcgtcacgtaatatagttaatttttcagcaaaagctttatattcttcatacacctctccggtcatcagctttgctgcttcctgctgtttattctcacggctcaacttcaggatttcatctgaagcagccctgtatttttcccatgcagcgtttgctacttcgtaatcgtcctgtccttttttagcatcactgtctgcagacatgattgcatccagattcgcaccggtatcttggatctgactctccagcttccgaatttcctcttcacaggcagtcataaccgatgcatctgattctaccagatgctgatactgcttgattctgtatttcgcagtcattgtctctaaatcctgcagatattccaatgacggagaccagacctccgtgatcttctctatatttgaacggatcactaatgtcgagatcagtgccaccaacactaaaaataatgtcataacaagtactgtcattcgatataattttaattttcctgcaacctttaagttagctatacgctttttaatcttttccatgatagttttccatttctttgtaaattatttatcttttatcacattcgtttatccataaactgctataagatatcatactttattggaaaagtctataaaaaaaagtattaaattattttctactaaatattaatggttctattgctagaaactggtgaaaatacttctttctgaccatccaatcccaaatcttttgccatttgttccatatccttatatatcttgtctttgtacttatcataaaggaactcaaatccatctttgcgaagaattgatggcgaattatccatgtgagtgcagtctttcataacacagtcatatgcaagatttctgcacataaatagactgtatgtctagacagcttaagctgttgttctgttaactgcaaactgcacttctattattgttcctcctgatgggttaggcctgattgcaatactgccatcgtgtacccgcacaatttcattaacaagcgcaagtccaagaccaacaccaccaagctcacggcttcttgatttatctacgcgaaagaaaggttcaaacgaaagccagggtgcaaaataccgcaacctttcgattgactcttcctcaaatgcaggtaaatatgcctctgatattatggcatttcccacaactatactagttgatagaaatggtaatattgtaggtgacccaatgcttggaggaattgacaataaggataactatgattcacttatgaagcagattaaatctgtaattgcagcagatagcaatagcaaataaaacatcatataatcgtgtaggttttcctacattcttatatgataaaaaaccgacaattttatattgacatttgcaccataaacaggtatgcggataaaccaatataagatataatgacataacaggtgtaacgaattgaaaaataaaaaacaactttaatatttattatgtggacaattatgtacgatggtgataatcacttttcgcacgatggcaaacaaggcagatgtggcaatggtgagggatatagctgggatgataatgattacagacctgacggatgtctggaactgccaagcacactcagcattgcctgtcggtcagttgcaaaaagaaggggctgaaaagcctgctcttatatatacatatatctgtctcctatttttaactccagctcatacggatatcatacatcagccttgtaagtgcaatactgtctttagctgtatatacatcactgctacaatatccaagttttacgcatctgcttacttccctgatttcatattcaaagccatttatatcaaccggacactcgattgtttccggttcttttccttccacctcaagtatcattgtctcggcgtgttggaaatccggtaaaaatatacctccctttgttccctcaattctggcattacgttttaattcctgcccaattgtctggactgattctgccgtacatccatcattatatgtcagtttgagacagctgtaatcatctgttccatactcattaatatgtactttttgagtttctacattctgcggctcattccctgtaacaatacgcagaaatcccagattgtaaattcctatgtccaacaaagcacctccaccaagtgcagggttaaatttacactcttttctggcacctgttgcaacaaacccatactggcatgaaatatgttttatttctccaattactccttgctgtaagatactgcgtaaacaatcatacaatggaagaaaccatatccagagtccctccatgataaaaagatgcctatcccttgccagtctgtacagttcctgtgcctgtttatcatttatcgtaaacggcttttcgcacaatacatgctttccatgttcaagacataacctgcaattctcataatgcaaagtatttggtgttgctacataaacagcctcaacatccggatctttaaccagtgcttcatacgaatcataatatcttgggatatcatgctcattagcaaaggcttttgcattttcaatgttacgtgaaccaactgctactaactgttcattttctttactcatctgatttatggttgatgcaaatttttttgcaatattacctgtagccaaaattccccacttcatcttatctctcccatcgattctataaatttatatgtaatatatacccatttaacaattattaaaggacacaaatctattataccttatatcaccagcttcgcatatccattttatatcatattttataatacaaaaggccagccccgccaatactaatagtttctgacgaatctgaccttttacaattacaaaaaaatatatattacccttcaatctctttaataagattaaccatctcaatagcaccttcagcacactcaaatcccttattgcctgcctttgttccggcacgctcaatcgcctgctcgattgtatctgtagtaagcactccgaacataaccggaatgtcgcttgcaagtgatacatttgcaatgcccttggaaacctcgctgcacacataatcgtaatggcttgtcgcacctcttataactgcaccaagacatataacagcgtcatacttgccgctttttgccatctttgaagctatcaatggtatctcaaatgcgcccggtacccatgcaaggtcaatattttcctctgaaacatcatgtcttacaagtccgtccttagctcctgcaacaagcttagacacaataaactcattaaatcttgctgctacaatacctaccttaattccactgtcaactaacttaccttctaaaactctcattatcaattcctccttataaatatttcatttttttacaccacatttaaaatgtgtcccatctttgtctgctttgtcttaagatagaacctgtcaaagctggtcgcatctatctcaataggcactctctcactgatttcgattccaaaatctgcaagctggtataccttatcgggattgttagtaagaagccttaagctcttagcacctaagtctttcaatatctgtgctcctatgtagtactcgcgcgcgtctcccggcagaccaagcgccagattagcctcaagtgtatccattccctgatcctgaagagcgtatgccttaagcttgttgacaagccctattcctctgccctcctgtctcatataaaggagcacacccctgccttcattgttaatctgtgtcattgctgacgctaactgctgaccgcagtcacatttcattgagccaaatgcatctccagtcaggcactctgaatgtactctgcacaaaagattgctgccatcaccaatgtcgccctttaccaatgcaacatgatgctcgccattcaacttattgacataacagtgtgctgtgaattccccgtattttgtaggcattcttgtaactgccacgcactcaaccagattgtcatgtctctttctgtattcctgaattgctttaattgttatgaatttgagattgaatttttcggacatttctatgaggtcttcttttctcatcattgttccgtcctctttcattatctcacagcacagaccgcactccttaagtcctgctattctcataaggtctactgttgcctctgtatgtccgtttctttcaagaactccattaggctttgaacgtaatggaaacatatgtcccggtcttctgaaattctcaggcttagcttcatctgacacacattctctcgcagtaaagcctctctcctctgccgatattcctgttgtcgtcttaacatggtctattgacactgtaaatgcagtttcatggttatcagtattgtcagcaaccatctgtgtaaggcctaacttcctgcacaaatctccactcataggcatacatataagtccttttccatatgtcgccataaagttcacattttcagtagttgcaaattcagcggcacatataaggtcgccctcattctctctgctttcatcatctgaaacaagtatcagctttccttcctgtaaatccttaactgcctcttctactgtgttatactcaaacattttcttttaccttcctttccctttgatattttaaaatccattctttagcaggaactctttcgttatcccgcttttcggcttttccttttcaaatgtgatgaatttctctatgtacttaccgacaatatcattttcaagattaactacatcaccagctttcctaagtgacagcgttgtcgcacctgccgtatgtggtattattgatactgaaaagctctggctgtccgtcttggcaaccgtaagacttattccatctatggcaactgaacctttttcaacaatatattttaatattccgatgtctgtcttaatctgataccatatcgcgttatcatccctggttatcgctacaacttttcctgttccatcaatatgtcctgaaactatatgtcctccgaaccttccatctgctgccattgccctttcaagattaacagcactgccagtcaccagcttgccaagtgatgagcggttcagcgtctcatgcattacatccgcagtaaatatattatcatatatccctgtcactgtaaggcacacaccattgacagcaatgctgtctcctatatgtgtaccctcaaggactttttctgcctgtattgtaaggattgccgacgccgttccttttttcacattatttacatgtccgatttcttcaataatccccgtaaacattacaactctccttcaatcagaatatcgtcaccaagaagacgaactgtcttgtttctcaactgatatgcttcatctacatttgcaacacccttaccttcaactgctgtcttactgtctgtcccgccaaatatcttaggtgcaatgtaagtctgaacccggttcacaattccagcctgcaatgcagagaagttaagtgatccgcctccctctagaatcacgctgtcgatacctttttctccaagtatgttcataagctctttaaggtcaacgtgctgctctgattcttttgtaattatcacttcacagcctgcattttcatataaagatttcctgtcgctgtcggtactacatgtagcaattattgttggtatctgccctgcactttttacaattctgctgtccagcggagttctcaatctgctgtcgcatatgattcgcacaggattgtgtggattgcttacggctgtacttctacagtcaagcattggattatcagcaatcacagtgccgacaccaaccataattgccgcgtatctgtgacggtctgcatgcacattttctcttgcctgctcacctgtaatccacttggaaagtccattatatgtggcaattttcccatcaagtgtctgtgctgttttcatcacaacatatggctctttattccttatgtaataaaagaatacataattcatcgccagacattcttcattgcatacacaaccttcaactttaatcccgtgttcttccagatatttaacaccttttccacttaccaggggattaggatccatcgaacctatcacaaccctgcttattcctgcctgcacaagtgcttcagtgcaaggcggctgtttcccatgatggcagcacggctcaagtgtcacatatatggttgctcctctggtatcctccatacatcttgaaagtgcatctctttccgcatgaagctcaccatatttcctgtgccagccttcacctataattctgtcatcctttacaattacagctcccaccagcggattaggattaacccagcctgttcctctctttgccagttcaatcgcccgcttcatgtagaattcatcttcttttgaaaaattgttatttatttcctgctgcatatctgcaccttctttctgttccttcctgtccagcttttttctgttctgctttttctgtcctgattttctctatccttatttcccttgtctgctgtatcttaatttcattcttaatgtgcttgctgctttcttgattttgccggctcaaagtcgtgatacctataagtagtcgcattttcaatggtttagtaggtcttttttcatcttgtctataatattaaacgcattttcattcctcaaagacctataaattcattgtttatagctcatttagtaggtaaatccatatgttttctttggttttcctccaaaataaacctaccaaattcttaaaaaacttgtattaataggtttttaccaaatttacctgctgccattctgctctgaattgctataatatgccgccagattgctcagaattgaatcgccgtaatatgctgccgccacaattgccagttccaacatttcagaccagactcagcctcaacaatacagacatcctagcacaaccaaaatccagcccagacataaaaaaggcttccaaagcagtttcatttcaccacttcagaagccttacgccaaaatatcgaatttttataatcaaattcttactctgacaatcaaaaaactctgagataataattcatctcagagccagtatccacattcaagccagccattcattctactatgattacattatgaataactaactttaatatcacttcttccatccagactttactgtcggcttcggaattacaccgaatcatgctctggcttacgcctcggctcgtgggctttaccaccggtagggaatcacaccctgccctgaagttccatatgtattaaattgcttatagtatacacccgattttcaaaaaatcaagttgatttttaaaattactaaacaacatttcctatcagaagatgctctaccgcacttaatttattaaaaaaagtttcatccacacctgttatatcaactaacctgttagaactaaattcttcctctaatcccggatgaaacgccacaatttctggatacagcaccttccacatatctccctctttatatataccagattgtgtaagaaatgttatctttccggatgaaatgttttcacctctgtatactttcatataaacacggacacttactccatcctgttctactttggacacctttaccggacgcatattggcgtcatcttcaaccttttttcggtactcctcatcagacttatttcttgatttaattacatctatcaatatcataactgataaaagaagtcctaaccctcctataaaaaaggctataatataattatgattaccccataacattactgctacaccatcaagcaacagatagatacataatgctgctattattcctccagcctttgcactctgattaaatatactctgatatgaactaaccagaataattgtgcccataataaacataaacaaaccaatccatataattgtattcatttcctctccccttaaaattaatttataattatgtttattatatcattatagcaatttaagtccaaattttcttgacatatttattaatcttatgatactataccacggcacaattaaatatggttatattggaaacgacacatcccccggatgataacgaacaacacatgttttgcttaggttattatttaaggaggattttttttatgccaaaaaacaagtttcaggatgttattttcacaattattatggcaacaattatggtctatggaatggtcgtatataatgttgccctcaacacaggtactgtaaatggtactactttcttagctgcaacacatgaattgccaatcatggttccaattgcattcgtactcgaattcttcgttgtaggaaagattgctaaaatgcttgcatttacagtcatgcgtcctactgacagaccacagttcatcacatatgcaatatcaatatgtatatgctgcattatgtgtccggttatgagtctcgttgcaacatttcttttcaaagagccatcctttggcatgtgggttaaaacatgggcaatgaacttccctatggcaatctgctatcagatgttctattgcggaccacttgtaaggcttatatttagggcaatatttgttagaaaaaatgctgatgcaacagaagctgtaacggctgcagaggcagaataatattaatcactaaggggctgtcacttgacagccccttaaaaaaatcaattatttataatattacattttcaaacaaaaataccattaccggcatggttactatagcactaagtgttgtaatcacatttatggcactggcatattttgaatcattgccatatacctgacacatctgcgtaactgttgatgctgaaggtgtaataactgccaagaaaacaataagcataattttaggtgcatcctgagaaataccagcaagatggcttaattttatcaaaagaagtgctataagcggtacaacaaccattctcaacaaagaaacaaaatacagccttctgttagcaaaaattttctttaaatccatccctgcaaaaagcattcctgtaactatcatgctggcaggtcctatcatattgccaacagagcctatcgtatcattaattattaaaggcagtctaattcttgtaaagaaaagtattacaccaaccacaatcgagatcatatttatatttaacacaatcttcttccagtcatatgaactttcacggctgattatttttttacagtgagtccacaaaaagataagctgcacactcatgaaaacgcatccgtaaagcacccactcctgacctagaataaatgtcacaattggaacaataagattacctgaatttgaataataaacagatgctatctccacctcattcaggtgaaacaatctccccataactgatataactccaagcaatacaatctgtaatgtcactgatgccgccaaagcaagcaacaacccatttactgtctttgatgtataatccacctgaaaagcctttataatgacacatggtataatcaggtataaaacaattttggataaaactttactgtcctcatcttttacgatacctgcttttacaataataaagcccataagaatcataatgaatagctctactatctgttccataagaagtatgctaatatgcataaaaatcatctcctattgttatgatacacccaacgcattataaacatcttttgcaattatcattcccccacctatattacatatgttctttgtaaatatcaagatgcatgactaatgccataggtcgtatgtctgattgaataatagctcctgtcccatacgccgcaaattcatatgggaaaacctattctccacaagagaacataaaaataaatattattactgaaaaatcgtatcatgcatatatgttaaacgcaatattcatcaacctttttaaaataaattggttatatgttgtctttttatggttattcactgtataaaaaacgtgcgaatacacataaaatagtaatagatattgaattgataaattctggatggtataatcttattaccaaaaagcgtgccaatacacaaaaataaggagtagagttcatggaaattaaaagagatgcataccttgaacagttaaagataagaaaagacaatggaatggtaaaaattattacaggagtcaggagatgtggaaaatccttcttgctatttgtattgtttaagaaatatttatcggaaagtggcatagataatgaccatatcattgagattgctttagatggcattgaaaatgatgagttgagagatccaaagaagtgttaccagtatattaaagatgcaatgaaagatgaccagaagtattatctacttttagacgaagtacagtttatgccacgatttgaggaagttctgaacagcctgcttcatatcggcaatattgatatatatgtgactggcagtaattctaagtttctatccagtgatattgtaactgaatttagaggcagaggagatgagataagaatatatccgttgtcttttgcagagttctatgcagctttcggcggagattatgatgatgcttgggaagaatatatgatatatggtggtttaccacaggtggtacagttctctatggaacgccaaaaggctgagtatctaaaaaacattttcacaaatgtttatattaaggatgttgtagaaagaaacaagcttcgaaatgttgatgagattgatacattagtagatattctcgcttcttcgataggggctccaactaatccaacaaaaatatcaaatacttataaaagtgagcgtggtataaattacagcaataagaccatatccaaccatatagattatcttgtggaggcatttttgatttctaaagctgacagatatgatattaaaggcagaaaatatgtgggggcaaatctgaaatactattttacagatgtgggacttagaaatgccagattgaattttagacagcaggaacctactcatatcatggaaaatattgtttacaatgagctacttatcagaggctataatgtagatgttggtattgtagacgtatatacgaaaaatgatgaaggaaaaacaactcgaaagcagtttgaagttgattttgtggtcaatcagggtagtcagagatattatattcaggtggcttacgatatgacttcagaggaaaagcagaagcaggaacttaattcatttagaaatattccagattcgtttaaaaagattgtgatagtaaacggaacaaaaaaaccttggagaaatgaagaaggctttgtaatcatgggaatgaagtattttttgcttaatgcggatagtttggagttatagtatgcttggacttgacagaattttttgaatgcgggaaacttcttgtccgaagggcaatatggtgtaactgaaaaaaataaaaaccaccgaaactacagagggtaaaataaaagaatgtggaaattgggggcaccctagaagagattccatggggagaagaatctatgatacaagaacttccatcaaatatttctgcctatgtatgcaccaaaaattgtattccacatttcaattcacctgcccttaaacgaaatatattgtcaaactataattctgctaattctttatagtactgacaaaaaccgtttaaatgcagcaattcccttttctgtgcgtttatatacacctgcacattccagaacctgcacaaaacaatctgcaatttccttctgaataatactctctatattttctgttgtaatatcataagagtccagccattcatctacccagtcagcatgaatttttatttcctctatatcatgaatatttttcccttcaataatagcttttgcaagtatatccatttcttttttcagcctggaaggaagtactgcaagccccatcacttctatcaatccaatattttcttttttaatgtgatgcagtttttcctctggatgatacacaccccatggtctgtcctctgtcgtaatattatttctgagaaccaaatccatttcatataaattcccattcatacgtgcaattggcgtaattgtattatgtggtactccatctgtttcgctaaaaataaatgcctcttcatccgtatacccacgccacttttgcaaaatatagtcagacacttttgcaagtcttccaatgctgcttccctgcaatcttatgactgacagtggccacttaacacaccccgctgtcacatcttcaaatcctgcaatctcaaacatatactcatatggagcttctgccatagcaaaagtatatgctccaccttgaaaatgatcatggctaagaattgaacctcctactatcggcaaatccgcatttgagcctaatgtataatgtggaaactgtcttacaaaatccaataactttacaaaaacagcttcatcaatcttcatcggtgtatgttttgcattaaacacaatacagtgctcgttataatacacataaggcgaatactgcatgtaataatcttgtccatctagctttagtggaataattctatgattttgccttgccggatgtgaaagtgttcctgcatatccctcattttctgcacataacaaacatttaggataatcattctttgcttgagttgctgctctcgctatgtcccgtggatctttttctggtttagaaagattaattgtaatatctatcttgccatactgtgtgtctgctttccattttttatctcttgcaactctgtccttacgtatataatttgtatcctgactgaattgataatagaaatcggttgctttttttggatttttgacatacaaatctgtaaattttgctctgaccacagagggtgcaggtgttaaaatccccataattttagtgtcaaataaatccctgtatacatttgtattttcaggtatcaatccatgctccgctgcataatcagtcatatcagatagaatttctgataactgtctgattgctttatccgtctgagtataactgtcaagtctaaacaactctaaaagtctgttaatcacataaattttatcgtcttcctcaaccaatcctttttcaataccgtaacctactaattctgaaataagttcattcatgttatacctcctagtatccgtccggatgatttacatgccatttccatgctgttgaaataatcgtctcaagatctgcatactgcggtttccacccaagtactttccttgctttttcactggatgctatcaacactgaaggatcaccagctcttctttcttcttctcttataggaattgtatgatttgttacctttcttgccgtctcaataacttcttttactgtaaaacctacaccattaccaagattaaaaatattgctttctccgccttttgagaggtattccattgcaaggatatgtgcctgagctaaatcatttacatggatataatctcttacacaggttccatcctttgtgtcataatcatttccaaatacagatatgtattctctctttccgttcggaacctgcaaaacaagcggtatcaaatgtgtttctggattatgtgcctctccgatttttccattcgggtgtgctccacaagcgttaaaataccgaagtgaaacatatcgtaagttatgtgccttagatatccatttaaacattttttccattgacaactttgtttcaccataacaatttgttggaagtgtacgagccgtttccaaaataggtatactttctggctctccataagtagctgcggttgatgaaaatacaatcttatcaatgccatgctcaaccatactttcaagcaacacttctgttccacataaattattattatagtatttcagtggatttttcatgctctctccaacttgtgagctggcagcgaaatgaataacaccatctatcttttcttttgataaaatattatcaaggaatatcttgtcccttatgtctccttcataaaactttgcctgaggatgtactgcctctttaaaccctgtaagcaaattatcaattacaattacttcataacctgcatcaaccagctcatatactgtgtgtgaaccaatataaccagccccgcctaaaaccaagattctcataataataccctctttctatttcataacacttttatgccaccatattttcttattctcaaatctttacaagaatctttaccaaatattttatccatttcgtatttgtaattctccacatatccattcttcacaaacgcctgtatggttccagcaaaacctcctccatgtaccctgcatacaccattttgtcccaaaaacatttcacttacaaataatgccaaagatacattctgattttttatatcctgatttgagtaaacattctgcagatatttaaaagaagaattgcctgacgctttcacatcatctagaaatgctcctatatttcctgctttcaatgcacttacttctttttgtactcttttattttcgtagataaaatgcaatgtcctaaggacacatctgtctccaagtttttttcttaaatcagtaatattatccaatacatcatttatagatatgtcgcgcaacacttcttttccaaaatattttgcaaccagtttcatttcctttggaattgctgcatattcatctgttaaatcagcatgtgaaccttttgtatctgtaatacataacctataaccatacttttccatatcaaaatcaattttttctacatatgggcattctgggttggcaaaatcaatatgtacaagattaccaattgaacttgccatctgatccatcagaccacaaggctttccaaaataaacattttcagcatactgtccaataatggctatctctgtcgctgaaatttttccacaattataaagtccagacaaaatcgttcctatcagtgtttcaaatgctgccgaagatgaaagtcccgcaccaatcagcacatcacttgttatatatgcctgaaaacctccaaccgaataatttctttcaaggaatccagaaaccacaccttttatcaacgcctttgttgtttccttttctttttccgctacagatacatcatcaagccggataatgatttcatcatagttatcagaaaccaatctgattacattatcatctgtctttcttacaacccctattgtatcaagattaacagatgctgccaaaacctctccgttttgatgatccgtatggttgccgccaatctcacttcttcccggagcactgaacaattccacatctcccggcttatagcactgctcaaatttctttattgcattgatatagcgttctctttgataataaatttttgtatcatcagcatacacatctaaaagcctctcatcatatacgccatctaggaaactttgaatcaatatatctgtctgcatctcaatcaccccacttaaatcaacatttatcggataatataaaataatgaataatttttatcagccaatcatatccaattatacttactaatagaaattaatcctattgttatcctatattatccgtaaaatcaccttgcattcttgttatacataatatacaaaaaatagctcaaaaaatccatatcataaattgtacagattatgcacaaaacaatattattagtcatcccagataagtataatttttattttcctaattcattatgcttttccatttaaagtctataattcaaataatttataacattacattagtttgtttcatttatgatttgttttattaaagtaaatagacattatatgcataaaatgataaaatcacattgtatatttaataatttcttatatttacaacagtatatatgcatattatttttaattacacgtaaagggggctttatatgtataccaataacgcatacttgaacaattccactattgacaggaaagataaatcaaaaggactaattataaccatgtgtggtacttataagctatatactaagccaaaacttcctacatggcgtccgcgtggcagactggatttccaattactttttatcgcatctggaaaagcccacttccattttaataatgattcagatgaaaccatcgttcatgctggtcatatggtattatacagacctaaagaacctcaaaaatatgaatattatgcgaaagacaatgtagaagtttactgggtacatttcactgggaataatgttaccaatcttcttcgttcctatggattaactgatgacaaaagagttttctactgtggttctggatctgaatatcagattctgtttcgtgaaatgatcaaagaactgcagatgtgtcagaatggatatcctgaaatgctagaaatgtatctacgacaaatttttataagactacatcggcattttttatcttctgtatctcatgataatacacataaagctgatgaaatagacaatgctgtttcatactttagtgaacattataatgaaccaattaatattgatagctatgcagagcaaaataatataagtacaagctggttcattcgtaatttccgcttatatactggtattacacctaaacaatttattatgcgtaaaagaatatacaatgcagaagcacttctgcagaatcctcaatataacattaacgaaattgccaggattgtgggctatgaaaaccctctgtatttcagccgaatatttcaaaagttaaaaggtttatcaccatctgaatacagaaaaaacatataactaaaagcagagaatatagattctctgctttttctaataatatgcatattatttgtggggaatttggccatcaacatataaaatattatttatcatgttccatcctttttctatattctctaggtgtaattttatatctgtccttaaatacacggttaaaagttctttgactttcaaatccgcaatcaagacatatgtttgttatagaatccatcgagttttcaagttctgcaactgcataatttaaccggactccattcacatatttactaaaattacaatgaaatgtcttcgcaaacattcttgataatacatatttgcttacacataattcatatgccattttttcaaggctgatgttttctctaaaatttttggctacatattctaccgcattgtaaatcagatcatctcttcctactgcacttttatcaatcagtggcattgttgtgaaaacatatgctaaaatcatctgtgcatatgcctttatcagcattggattgccatctgttatttctgccaaatattttatagcatttactacatccggatgcacttttctttttttcacaactggattttcaggactgtaattctgaagttctttatagtatgaggggaatagttttggattaagatataaatatattaccttattcttcttttgcccaaaaacttgataatgatgtattacgttagggaatattattgcaaaatccccttcatccatatggaacaattcaggccccactccaagttctacttctccatccgttacatacacaacttctattgcttcatgcagatgcggcggcacatgtactggttctttccactcggatgataatcccgtatttttattttcatataccaataacacttacaagcaactccttttatttataatccctgtttctccactatccttcttgttttaattattcgaccaaccaaatccactgtaggtcccaatgtaaccaccattaatatagttatcacaaaaaaactctttacccagtctttggtaatcttaaacttcatattctcatcccgcgattaacatatgctaaaggaataatccttatcatcttctgcactgatatgatattcttcttctacatcagttccccaactgtcaatgcctccaacacctcttactgcaccatatacacataaaacagttcttcttgctggtggcagttcttcatgatggagggcattttcaatctccgatgccgtataaggcagacaagaaaacgcaaaatttttgtcatttttttcaatgcgtaagatttgagatgaactgtctgtcctgctgttatcaagcgttgtatgtcttgtaacttcaagccactctgtatccattctcataccacattcctgtggaacaagatattgtgtaagactcaagtcattaatctcatagattccttctttggctcctgcctttctatcaggatatgtttccccagacagtcccttatataaatatttatctgccagagttggcataataaacctcattccaaatacaggaaattctggaagtccctgtaccccattataatgtacatccacacggatctttccggatacgtcaaccgtatagcttacaagtacagttgtcgctggaattgttatggtctcatatgtatattttacgacaatttcatcagcataaacatcacaaccatagctattattatctggtgcataaggtttttgttccttaccatccatgataacctgaacttctttacagtcaataaacatatctgctgaaagccagctaccgcttttaatgtggaacctgcttcctctgtcattatctgtcaatgctctccagaaagtaggtttaggacaacgatacagccactcatagccatttttaacgatagattccaatccaccctgtgcataagaaaaaatataatcatatccttctccatgtacaccaagtgtatagtcaccatagacaactcttaatttatctgtataagccatagtagtacctcacttcctgcatcgctggtttttctttcctgtcagcaaatacaattccatttgctgagaattcatagtctgctggtttatcgtcaaaatctccgccatatcgtaaaacatcttttcctgtcactggatcctttaccataattgcctggtcaatatagtcccatataaatccaccatgatacatatcatatttgtcaatcagtttcatatacgagccaagtcctcccatggaatttcccatatcatgcatgaattcacataaaatatatggtttcttcggactgttattcaaatatttctctacatcctctggcttcgcatacattctggtctctaaatcagaaattgtatcctcgtatgtcctattataataagcactctcataatgaactaatcttccatcctgcttttcagcaaaataaacattcattgcctctatgtcgtcacctgcatatgattcatttcctaatgaccagaaaaggatggatgtatgatttttaaaagtttcaaaattattttttgcccgatcaattacggcacccttccactgtggaaaagatcctggtacattacatgatggttcaattgcacctaacttctggaacgaaccatggctttccaaatttgtttctgccatcacataaatacctgcattgtcgcacatatagtaccatggtatctgatcaggatagtggcaagtacgcacagaattaatattattccttaacaaacaggatatatctgctttcatatcttctataccaatgcatcttcctgtttttgcattccactcatgacggtttacacctgtaataataaggcgttttccatttaaataaattattttatttataatctctattcgtctaaaaccaatatcataagggattacctctgccaaggaaccatcctcagctttaagttcaacataagcatgatacaaatatgggttatgattatcccacagtttaacattttctaaatcaacacatatcgtaccttctaaatagtcattatctttatttagctgtatggatttctctactaatacattttcttccctgtcttttaaaataaagcctgcagttacattctgaccatcaatggcggacaccttcatgtttacagttatacttccgcttacattatcacggtttaatactggtttgaaccaaacatcctccaaatgaacatctggtattgccttcaaagtaacatttctgaaaattccaaagaatctgaaaaagtcttgatcctctaaaaatgctgcagtactcatcttatgtacctgtactgccagtacattccccttttccctaatatatggtgtcaaatcaaactcagaaggtgtgaagctgtcctcggcataacctataaactgaccattaagccaaagatacatagcttcttctacaccttcaaagcagatatggattctctttccacacatgcttttttgcaaatcaaagtattttatataagaacccaccggattgtactctgcctctgaaaacattcctttttctgctccagttgcctccatactataggctcctctgtggtactcttttccttcccatggatacatagtgttgatataacggattttatcatatccagccagttcaatatgtcctggaaccataattttatcaaattctgatgtatcaaatgtatctttataaaaatcaacaggtctttccatcacatttttgctgtaagcaaactcccattgaccatttaatgactgtaataatggattcttttctttttttatgtctgaataatccagataatagcaatgatcactatgtggttccaattgatttactttaaacacttctggattgtccagccatttcatatcagcattcatatttttcctcactttccatatagcccataatttctgtcccatggttagagatagacaccaaacttcagaccatattccttacacgcctctgctgtttcacgcacaatatcacctttctcattcttataaggtgagtttttaatgctgtgctctgtatacttgcttggtcagaggcaaaagccgtcgtgatgcttacaggtaagtatcaatccgttcattcctttatattccatatcaacattcctccaactgttttttaagtttttcgtttgcatcttcaacattcattcttgacatgatgaatgtaattattaatgacaataccataggaatccataaatacataatatgaagcatatttaagcaagaggcaggttgcaccgctgcttccttaacaaatccacttacatcaagcaaccatccacataatgcaactccgattcctcctccgattttcgtaccaaaagatgtgcatgaatacatagttccatcaatgtgtttatgctttgtaagataagtatattctgaacagcttgcaacaactgctcccatatcaccctgccacggtgccattccaagtgctgcaatcgctgtaaatgcaagcataagtggaacgcttcccatataacctgcaaagatgactccgacacgtcccactgttccaagaacatatcctgcaaagttcattcgatataaacctttcattttttccaccagcataggagtgatgcacattgcgataataacagggatattaattgcccatgaaaatacggaatacagattttcatttttcaaaatataaatcatataataaatgcccatatttaacatagctgaataaatctgctgacaaatataagttgcacaaatcataagataatatttattagaaaataaaagttttgcagcctctattagtccatacttttcttctgtgtgattcttccccgcttttaattcttcttccggaagctccttaattgaaaaaacagaaattgtattaacaatcaatccaataatggcatatacaacggcaaccattctccatgctgctgccccaccgcctgctgctcttacaaactgtactgtaacagactgaataagtaagcttgtcgaaaatgcaaagataaatcgacatgatcccatctctacacgttccctgctgttttttgtacaaaaagtaactaatgatgcatatgctatattgtttgcagtgaaaaatactgcatttaacaatgtatatgctataaagaaccatatgtactgtgcagttgtcccaagactgtctggaatcgcaaagtttgcaacgagtgttacggcacaacctatatacgcatataacatccatggtctagcttttccaagtctactttttgttttatcaatcatagttccaaagaacatatcgctgattccatcaaacagctttgataccataatcagcgttccgataatacccggatttaaacctaccgtatttgtcagatacagcattacaaatgatgagagaaatgcatacacaacatttcctgcaaaatctcctgatccataccccaccttgttataccatttcaggtacctcttttcttccatgtgaaacttctcctttcaaaataccaattattttattcccacaattttgttatatcaaagatataacaaatatatgtaaaagacaatttcataaattatacaaagtatgcacaaaatgatactgcttactttatataaaattctgacatttataacatgccatatatgcaattattgtctagtttttattctcttttggcatgaaatcaaacacatatacatctattatttcaggtaaccaagagataattccccataaaaaatatcaatcccacagcgtttttgaaagattttcagttcccatttttattaatttatactgttttaataaatcacaaaaagagacgttatcaaaataacgcctctctttttagtctgttatatttatctatatatcatgaatacttatacaatgctctcaatatagcatagtatgctttaagcatatcataaccgtttccagcaataagaatcccattcatattaagataattttattcattaaactcagcaaccttaaatttttgaatcatttcattcaaattttctgcctcactgctcatctcctgacttgctgctgcacattcctcgaacgttgctgaattagactgaaccacatcattaatctgttctatgccctcattaatctgtaatatttcctctgtctgtgtttctaatgtgtccgcaattctcatcacttcatctgtaattatttttgactcacctgccacttcttcaagctgttttgccgtatcttctgctacaaccatcccattttccactgcttccacggaggtggcaatcagtgctgatgattctctcgctgcctgagcactctggtcagctaaaatattaacttgatttgctacaactgcaaatccttttcctgcttccccagctcttgcagcctcaatagatgcattcaaggctaataagtttgtctgacttgcaatttcattgattgttgtaataattttatcaatctcctttgaggccttgctgatttcattcattgagttgaccatttcatgcattttgctgttactttctagaatattatcccctaatttttcaacccttttacttatttcttttgtcgtctttgaattcttttcaacttgttcagaaacatttgaaacagtcgcagtaagttcttcaacaacagctgcctgatttgttgctccttctgccaattcatttgagctcattgacacctgctctgctccactagacacttcctccgatacatgccgtataccttttaccgtacttgacatacttttctcaaatgctaaaaatgaatttaaaataccaataaaatcgcctttccattcaacctctggttttacatcaaaattaccatctgaaaacagtttcatggcacggtcaatatcatctacatatgaacccaaaatatatattgactcacgcatactctgagcaagtcgaccaatttcatcctctgacttatactccaatgtactgtgcaaatttccctcagttagttccttggctgcattttcaatttcatgcagtggttctaaaatagttgtaagaatcttttttcctgtttttcgtgataaaataactgcaataataagacatacaataataaccacaaatcccacaaaagctgatatcagcgtttttcttactgccttaacgctctgttcacctgtcagtaaatctattttctgtgcaatactcaccaatttatttaacgatggcgtacattcaccaagtatgtcttcaacagcgtctttatcttgtcccttttcaatttgttttattatatcaaatcccttgtttcccaatctgttagtgctgatgaatattcgttaaaaagatcatcagaaacaacccctgtgtcttgcataactagcaattcgtccttgacctcacctagtagcttttctacagtctccttgtaaccagcataagatgaagaatcatcatttaatgccatttcccttatgttccgggcagccgcattcacatcaattctacatattttcactgccgtatcagccacattaacttttttaacatagttaaacatatttgcaaatagaatccctattactatcatagaaattaatccggatgtcaacatcattgtgataactattttatatccatagtttattctttcgtgcaaacgcatggtttcaagacttcgttttgttttttcttttaacaacataaatacctacttcctttccatttatttctttgataaggtatatatatatcatttattcagaattttaaataaaatatattgaataaaatatgcactaaatgatacgactgtaataattcacatatacaagtaatctgaaatttttacatttcaattaaaaaagtagaaaaaatctcatgtgcattgcacacagagcttttttctacttttatcacaacataactattctcatatttgctgctgattattttcctaaataatctaatgtatttctgttaaaatatttattttcttagtttttatataaaaaatctttaagcaacttttgactacttatttctttattttggcaagtatttttcctttttatattctataacaaaaacataatcagaaaggagatgaaattctatgaaaatcaaattacataattttattaataagttacttagcttttatgcaatcttctttactcatcgtttttatccgatgtaatatgcatagtctaccaaatagttttaatttttaataataactttatatccttttatagactattgacttattatatccaaatatacactctccatcttgcaatttttgtctatttatttttttgttttggcatgtattatgctttttcgtgttatacaatgtcgttgtaagaaaggagatgaactattatgaaaatcaaatttcacaactttattgaaaatttgctcagcttctatgaaactttcttcacaaaaggatattatcgtttttaaatatcatgtcatactaaaatatctgctcatctgttaataaataactcctatcatgaaaatctaatgtctttaaatctattgctatatctagcgaatagattcgcttatattctggaattatttcataccgttttttcttaatttctataagtttcgatatcatgcgcaaagtaagaacttaaatcaatacctgtattttatctaatgttatttatgctgcacgatgcatatctttttagtttaagcatgcattgtttcaatcaatagtctttttattacatgataatcatcattcatgcagctcctccttgtacctgccttattctttctttacattttaatcatacttttgccatcagcaagaaatatatttctgtttttcatagcatctaaccgactgccatgatttcgcacttccatttattaatatattataaagcagcttgttatcagaatatatgagatatataattataaaatagaaataaaaagcacaataaggagcaagcagatatatgttttattttatattggaacctataatgatgtataactggatattaatattagcggcagttattcctgcggtattccttatgattaaagtatacagagcagacagaatggaaaaggaaagcggctaccttttaagacagctagttattgcgggaattctatccaccattattgccttaattgaggaaaaaataggggaatggattttatcatgctttgttcccgaaaatacattgctgtatcagataattctttattttgttattgttgccatagccgaagaaagctcaaagtatttcttcttaaaaaaacggacatggaataatccagaatttaactgccagtatgacggtgttgtatatgcagtatttgtttctctcggatttgccctttgggaaaatatcaactatgttttatcatatggtttttcaactgctattgtaagagcaataacagcaattccaggacatgcctgttttggtgtgtttatgggtgtattctatggtctcgcaagaaaacagcataatcggggaaaaatgtttagctccaagatattcagaatattcagcattgtgttaccagttctattacatggctcatatgattttatagcttccatggaaaatacaatgggaggtctatatttcgtggccttcgttattatactttttgcactgtcttttggactggtaaacatctcatcaaagaatgataaatacatatgatatagaaaacaccagcacatttaaccttaacgtgctggtgtctgtatgttaatacttttcgtatttattcatctgtcttctttttaagaatacaagaaatactaccacgcaggaaattactatcagaactgttaatgctccaaatgtaaccactgctgggtgattattaattaagcaacatatttataagccagattattggcaggaagatatgcatctcctccatacaaagatgtataatcatttaccaccttattaccttttgcaactgcatttctgcaaagtataccattatccttatattcttctccgtcccattgaatggagtttattttatatattgataatcttttattttttgcgcataatccgtatatttccaccagaatatgttaatatatgaatatcaatccacagaatggagaattaccatgaaagcatatgaaagattattaaaatatgtcactttccgtacaccaagtgatgaaaacagtgaaaacacgccctcatctgcatgccagtttgagttagccagatttcttaaaaatgagctggaaggattgaacttatcggacattgtacttgacgatatgtgttacctgtatggtaaacttccagcaaccaaaggttatgaaaatgtgcctgctatcggatttattgcacatatggataccgtgtccgattattgcaatcacgatattacaccagtaataacagaaaactttaatggtgtatcactcaaactttctgcgggaataaccctgtctgtgcatgagtttcctcatcttggcactcttaagggacgcacacttatcacatcagacggaagcactatacttggtgctgatgacaaagcaggtattgctgaaatacttactatgatagaacatttgcagaaaggcaatatacctcatggaacaatatgtattgcattcacacctgatgaagaaatcggcatgggagctgaacattttaacatagaacagttcggtgccaaatacgcctacacaattgacggcgacacagaaggcgagattcagtacgaaaacttcaacgcatgcaaagcggattttcatattaaaggcttcaatgtacacccaggttctgccaaagacaccatgattaatgccagtcttgttgcaatggagattaacaatgcacttcctgctatggaaacccctcgcggcacagaagattacgagggcttctaccatcttgtcagcatgtctggcgatgtcagtgaggcttcgcttaattatatagtaagagaccatgataagaatttatttgaagcaaagaaaaatactctgcgattaatcgaaaagaatatgaatgaaaaatggggcaagggaactgttacgctcaccattaaagaccagtataataatatgtccgaaatcattgcaggctgcatgaatcttattgaaaatgcaaagaaagcctgtgaactggctgatataacgccacttattcttcctatccgcggaggcacagacggctgtcagttaagcttcaaaggtcttccatgccctaaccttggaactggcggacacgcataccacggtccttatgaacatattactgttgaaggcatggatatgaccgttgcaatgcttgttaaattggttggaacatttactgaataacaactatatttcataacacaaaacaggagttaagctattgacctactcctgttttgtattatcagttgctattcagtttttattactttcgctttgaaacaacatacataactgctgctgcaatacatccagctaacgcaataattgctattacaagccataatttcccatgatttctgtccccagtgttaattgatgatgcatttgtttcattttcatcaaatgtatactggcttgttgtttctgattctgtctgactgatggtctctgtctctggttcagattctttgatactttctgtttctttactactttcagtttccttgatgtcctcagtttcagattctgtttccctgctgctttccgtcactgtttctgtctctgcttccgtcaccggttctttaacagtaaaatgtgcactagctgttccactcgatgaaacaatacctataacatgctcacccgtcgataatttttttattaaatctggattaagtgttacaataatacttcctgcttttaccgtataatctttgtcttttacaagctctctgccatcaagttctacttttacaaaatctgaaaatgctgcattagacctaaatgtaattgccttatcggaattcttatcaattatacatttatcaccagcaattatttctggtgccagtttcgatgtaacaacactatctttgtctatctgctttgatgcatttgaatctgcaaagtattttaaacataaagagcagtaataatattcaatattaccttcctgagtcactgtagctgctttagcttctacatgctgtaacttatgattatccttatttaattcaccatattccttatgacacacttcacacactgcacgattgacgcatgttgcctctccgccactatgaatatgctctggaatgccaccctttatttcaaatgtgagtatattattctcgattgaattgacactgatataaatatctccgtaaatccatatatcttcacctattcctaatgctgcatctgcctttgtgttatactgtccaccaagaacttcataattccatttaggtgatgaaaaatacatattacttggaaacttagtgtcactgtctataagataacataccagcccggattttaatgaaattttatccactctgtttccattaatcttgaacagctgcttatactgagaatcatatttgttgccattatcctcaaagtttctgtactcaagatacaatgtcttacccttttccggaatatccatcttatatcctgtaatattatccgtacctgaagttcctaatgctttaagactatattctccttcggacaaaatcgtcttaatatcattctcatcagcccagcctaatacttctttttctttaagagacataaactgtggaactggagatatatgctttgccataactgacatgaaatacactggtgacgcattctttgagttatataaatccttcagccccataatatgtcccatttcatgtactgctgttgcgattgatacaaatagccggtcatcctcatccttaaataaatatccgttagtatcaccatcaggcttacaatacgaattggttatctggacatatttgtaactattaatagtttttttgccagtattaacagaaatattattaacataatctgtataattccacaatggtgatgaccagcttactgatatattacctgccccattattcttataaataattgtaattgaatcaatagtaccattgttatctttatcaagcacaccatagtcgtagtatacagtatcattataatcagaaattttattaccagatgatatggcattattaacagcttctgaccactcctgcctaagctcatacattctgcttgcacgctccgaagcatctttataaccaatagtattaatatcgctgtactctgcataatacccacgaggatgtgaaagtacaattgagccgccattatcatataaatatacacttctcattcttaatttgttatctgatacacatctgtaataatcgcctacactatatgaacctgcattatatgaattatctgttatttttctgacagaactgccttcatatacatcatttataaattcggtttcacctgcaaatctggcaaatacaactaaattagtaaaattactgtcatcatcatctgcctgtatcctgtctttatcacctgttaataacaaaattgacagaaaaacagcgcaaaataacagtattagtttgatttttctcataaaaattcctttccatgtataaacaagctaactattatattgtccggtttctctatcagaatcttaccatattattaaatttaattcaattaaaataactatttcacggcttgcaaactccacaggcctcataccccatatcaataatctcctgcctgcttcctgtataaatctttttattggaagcatccatgctcttggcactgttgcaggattccttatggaacttcttagtattcgtattaagtacatatgtctgcacatttgcagaatcagaaactgccgcctgtgaactgctctctgtcactgaattgtctagatggctgttacctgttgcataatcaatagcaattcccggctgtgcattaaaacaatacacattgaaaagaattccatcaccattatcctcaactgacttagcctccatctgcacaccgctggcaacaagattatcgccagaaaatacgggtgttacgcggtacagaacatgattaccagtttcctttatgtaatctgctaccatattttcaaaaggcagcataccatcaacattaagatatcttgttcctgtaatcagattcttttcattggcattctcaccagtaagctgataacctataagatggcacctgttatacagatatttaccatcaacactatcgtattttgctgtctgccatcccgtaggttttacttcaccaattgcaccacgtttctcagtaggcataatgtctttacctatattagcaaatgcagtagtacatcttccaagttcatccagttctccgtaactctcaaatgatatagtcgtgaagtcagcatcattaaacgctgggttattatcattaattacaacatacggttcaccctgatatactaaagatgccatatcatctgcaacagccgtactctgaacctcagcactccccacagtaccagcctgattatccttcttagaagagcatccgcttaacccaaatccgattcctgcaataaagaacaccagtaaaaatgcggttactctccttagcacttctaaccttatattacgcatgtatttttccttatttctttcttacatatctttcttcagtaattttctcatgagaattaccctcaaaatcagtagaaccctccagcttaaaatcattaagcatgtccttaggaaacttcacatcagaaggatacttcctgttccatttatacaggtaaacctcatccaccatatcctcataagaaacaatctcagagtcctcaacaaaacagaaatcgtcctttccagcaaaaccaaactcctgattaacctcaatattttcataatcaccaaaaagctgcttactatataaagaaagccataacttcccgccatcaagcatcttaataatatgctcattaagaacactgtccttagaaactcgtctgttattaaacataattccataatcatcatcaacaatagatataaccttcataatgtcctccttcttttatgtccagcaaggtgtgactgggttggataaaggactttcttaaaggtggaacgtgtcattaagacgctgtacggattttatccgcgttacagtcaccgtccgcaaccggcgcatactcgccatccatggctcgaatgcgcctttttcgcacatcgtgtgctaaaattgctacacattttataaaatcctacagcctctaaactccacttaaaccttcaagaaagtcctttatccaacccagtcacatcctccccatcacaaacacagttgctctacacgaccatagctcaatcccgccactacaccagcaaggaagcaatgcgaccaacgctgaaccacgcatctcaccccaccacaaaagcgagggagccaaagcgaccaacgctgacaggtaaaaactccccgggttggtgggctgggtgtggttgtgtggtttaattgaaaaccgtgtgaagacgccggtacttagttcgtggggagagccgccgcaaggcggcaaatccccacaaacttagtacccgctgcgtcttcgcccgagcgggagcgcgttttcaattaaaccatacagccatccccagccccctctccggggagccatttcttacctacttcttaaagggaaacttccccgattccagcctcttcttaagcatcacgccaccgatagtctgtggctgcttaggcggattattctcagcttctctttcctccgcttctgcaattctgcggcgaatctcttccatcttgttatccattgcagcaatctgatctgcacatgaagacaattctgcagccagctgttctgcttcagaatctggaatattcttcttataacggaccttatgctccacgctcgcccagaaatccatggcaattgtacggagctgaacctcaaccttcatcatcttcttttcattctgaaggaatatcggtatctcaattataaggtgaagacttctgtaaccgcttggcttaggattcttgatataatcctttctctcgacaagcactacatcgtcctgctttaacaggcagtccgcaagcatatagatatcttccgggaaagagcatattactcttactcccgcaatatctcttataccttcctcaatgccttccattgttataggaatatttttcttcttcgccttcttaaatatgccatccatagacttaattctgctcttgatactctcaataggatttctgtcatactgtaatgagaactcctcattaagcaccttgaacttagtctcaacctccataatggcgcatctgtaataagccatcagtgtgttaaacggcataatattttcttttaataactcaagcatttcatcagaaaggagattctctttaatgaatctttcctgttcctgcttgagtatctcttctaataacatagtaaccccttttacctttgatgcatcttaaagtgccttcttaatagcagctaaaagctcatcatatgtatcaaatgcctctaattcaggattatcagccttaatctgctctgtactcttaaagaggaagcctgccttgcttgctttaatcattcctaagtcattgtggctgtctcccgatgcaatagtatcataaccaatagactgtaaagccttaactgttgtaagctttgactgctcacaacgcatcttgaaacctgtaatctcgccattgtcagctacctcaagtgaattacagaaaatagttggccagcccagcttcttcataagcggagtagcaaactgtgtaaatgtatctgaaataatgataacctgtgttatgcttcttaattcatcaaggaattccttagcacctggaattggatcaatcttagcaatagtatcctgaatctccttaagtccaagaccatgctccttaagaataccaagtctccagttcataagtttatcataatctggttcgtctcttgttgttctcttaagctctgggattccgcttgcctgcgcaaatgcaatccatatctctggtacaagaacgccctcaaggtctaaacatacaatattcataattcctccttcacaatctgatatataaccaaattctattatattttactctaggatggcataaaactcaatatgcttctcccagataaattccacagtaaattcttttgcgaattcctgataatttgttgaatatacctgacaacatatcagtgaataagcaggttacattgtcaatccgttctgtatctccaagatttaacgcccactgttcacaaaggctgatattccggtcttaagtctttccagaccatccatcaatgttgccttagggcacgccacattaagccttaaaaagctccttccgtcaccaccaaagccttttccagctgacagatacagacctgtctcttttcgtatatatgcagcaagctttgttgagtcatctgtaatattacttacatcaagccagcataaatatgttgccttggattctgtcatcgaaactccatcaatctctgcatccacataactcttcgtaatctgtttattctcatagatatatgctcttaactgctcaagccattcctcgccctttgtaaatgcagctatagctgcatccactgcgaacacatttggctctgcaacctcatcggtattaattgcgcgccataccttgtgacgaagccgctcgtccggcacacatattgctgctgtctgtaaacctgccatgttaaatgttttcgtaggtgctatgcatgttacagatatcttcttgcatacctccgaaacacttgcaaatggcacataatcaatgcccgggtctgtaagctcgcagtgaatctcatcagatataacaacgactccatacttgtaagcaagctctccgatacgtgcaagttcttccttactccatacatttccacccggattctgtgggttgcacagaataagaagcgttgtctgtgggttcttaagcttaacttcaaggtcttcaaaatctatcgcatatctgccattatcgtatacaagctggctctgtaacacatttctgccattattaagaatactgttaaagaaaatgttgtatacaggtgtcatgataacaacattctcagctggtgttgtaagctttcttacagagcttgatattgcaggaataacccctgttacaaacataagccagtcgtcttccatcctgaaattatggcgtctttcccaccagcctgtgtatgcgtcataccaatcttttgatatctcagtataaccgtacacaccgaggtctgcctttgccttaatagcctccgttatctcaggtgctgtcttaaaatccatgtcagcaacccacataggaagctcattctctgccacattccattttaaagaatccgtattacggcggttcactactgtgtcaaaatcatatttcattctcggatttcccttcttaatctgactaattaattcctgcatactatcttagtaagcgaaggatcaaccttgtccttctcaattataagcttatctatactatctgctgttatagttcctgaagttggatttaacacactgtcaaccctgcttgtaatatcagcatctactgttgaatactcgaaagcaagtgttgtattaataagcttgcagttcttcataacaagattatcaatgtagcacaatccctgaaggctctctattgtacagttaataaacgtaagattctttgaattccagccaaggtactcacctgaaatgtatgaatcatacactgttatattttcagcattccagaaagcatccttgctcataagtcttgaatttcttatctcaagattcttacttccgtcaaatggataattaccgacaagcttaagaccatcaatcttcatattgttgctgttcattgcaaaataattaccctttgccactacatttgtcatagtaacattatcacagctccagagagtttcctctgcattgacaaattccacattcttaagacctagtctgttacatcttctgaaattcttaggtgcttcaataattgtatcctcaacattaatatcgttagtgtaccatactcctgctcttcccatctcaaagaaataacagtcctttacattgacattgttgcagtaccagagtggatatttccacttaaagctgctgtttacaagctctatattactgctctcctttaatggagactcaccatcatcaaatatagaatcttcaatatgaaggtctttgcttgcaaaaagagcacgttctcctgtaagaagctgctgcttaactaatttcttttccatatttactccattcttatctacaaacattaaaacccaatcaccatattataagtgattgggttacattctaaacattcttaaggttctctaccatctcttccattgtgtgccagccaagtactgcacatttaactcttgctggcatatgagagatatctcttaatgctccggcttcatcaagctcatcaatctcttcctcagttgcctcatccttaatcatcttaaggaaaagttctgaaagatgtacagcctcatcaataggctttccaatgataagctcaagcattatatctgctgatgcctgcgatattgcacagccatctcctgtaaatgccccatcaacaatagttttcttagcatcatcaaacttaagctttaagataatgtcgtctccacagcttggattaacaccctcaagctctaagtctgcattgtctatatcatgcttatgatatggatgcatgttatggtccgtaagaacctcattataaaaagttttagtctccatatcccataagccccctgatcttagatagttcttctataaaatgctgtacttcttcttctgtgttatagaaagcaaagcttgctctcgttgttgaattaaccttaaggaaatccattaatggctgtgcacagtgatgtcctgctcttactgcaatatgctgtgaatcaagtatagaagcaacatcatgtgggtgtactccgtcaattgtaaatgtgactataccctcatggtcttctgccttcgaagaacctattaagttgactcccttcatgtcattaatggcatcaacagcaatcttagtaagctttcgctcctgtgccataattgtgtcaaatccaacattgttaatataatcaattgccgcatgaagtccgactgcaccgccagtattaacagttcctgcctcaaacttatgtggaacctctgcatatttaactctgtcccagtgaacaatctcaatcatctcaccaccgcttaagaatggtggcatcttgtcaagaaactctttcttgccatataatgctccgattcccataggtgctaacatcttatgtccagaaaatacaaggaagtcaacatcaaggtctgttacattaaccggcatatgaggaacactctgtgctccgtcagccacaataaccgcaccatgtgcatgtgcaacctctgcaatatgctttatatcattaactcttcctaatacattagaaacctgggtaactgctacaagcctggtcttatctgtgataacctctaaagacttgtctgtaatctctccattctcatcaggtataagctgctttaataccgctccacatttttctgcaacctgcttccatggaaggaaattgctgtggtgttccataacactaacaacaatctcatcaccctctttaatgaaattcattccataactgtatgcaattaagttaagactctctgtagcatttcttgtaaatactatctggcttgcatctttagcaccaataaactgtgctactgcctttcttgcattctcatagctttctgtagcaatctcacttaattcgtatacacctctgaacggattggcgttcatctcctgataatacttattaactgcgtcaagaacagcctgtggcttctgcgtagtagctgcattatcaagatatgcaatattgcttcccgaaataagtgggaaatcttttcttatagactcaatcgtcttacttaactcactcattaataaacctctttaatgtagtcatgtatctcgttcctgataccatcatcagggattttgccacatacagctaatagcttagctgctgccagcatattgtaacattcctgtgccggtattcctcttgattcaagatagaataaaagctcctcatcaggctttcctatagttgcgccatgattacctacaacatcttcttctgcacaaagaataataggaatagtctggttgacacatttctcatcgatgagaagaacttcttccttctcattacctacagaacctgctgaacccttaacgaaatcaatagttcctctgaacagcttaaatgctgtatctctcaatgcacctgccgcattgattgcacattctgtcttcttgccgatatgtcttacgcagtagttcatatcaagtctttctttacctgctgcaacatatccaatctctgcagacatagagcttccatcacctgcaagcttaatctcacagccctcgtatctgttcttaccgcttaagtaaagctgcacaagctcaattcttgcaccatcttcgcagtaaccaccgatatcattaataaatgttgtctctgcgcctactctctgaatctggataagacggataaccgaatccttcgcagcatataatcttgtctgtactgctgcgaagccttctccatctttatctccattaaaatccatgtaaacatcaatgctggcattctctttagtttcaataccaacaacattgatgtctgcattactctttccataattgaagtcgagtcttacaaaacctgcattcttcttatctgttatataatatacaggttcagtctgtgacttcttagctgcctctgtaatctcctgaccacatccaccaatgatattgtcaagctcaccattgttaagctttccatcatcaatgagacttacatcattaacagaagcatttaactcacctgtacggtaaattacaacctctccaaccctgctctggttcatatgaagatgattccatgtcttggctgggatacggtttattatcatgtccttttcttcgatacctatcatatcatattcctcactctgattaacttaaccaatgctgcccttcatctcaagcttaataagattattcatctccattgcatactcaagcggaagctccttagatacattatcagcaaatcctgaaacaatcattgctctcgcatcatcttccggaattcctcttgacataagataaaatacagcatcatcactgattcgtccaattgttgcctcatgtcctacatccgcatcattaacacggatatccatagccggaattgtatcagatcttgaaatatcatctatcataagtgactgacatgaaactgatgatttactcttcttagccttggtagtcattgttaccgcacttctgaaagtactgattccgccacccttagatattgacttagtacttacaactgatgttgtagctggtgcgttatgaactaccttcatacctgtatcaaggttctgtcctgctcctgcaaatgtaattcctgtgaattcacagcttgaacgctcaccattaaggatactcataggatacagatatgatacatgcgaaccaaatgagcctgaaacccattcaatcttaccaccctcagctacagttgctctcttagtgttaaggttatacatattcttgctccagttctcaattgttgagtaacgaagctttgcattcttagccacaaaaagctcaaccgcacctgcatgaagattggcaacattatatttaggtgctgaacatccttcaataaagtgaagacttgcaccctcatcaacaataataagtgtatgctcaaactgacctgctcctgcagcattaagtctgaaatatgactgcagaggaatctcaagattaactccctttggtacatacacaaatgagccaccagaccatacagctccgtgaagtgctgcgaacttatgatcctgtggtgtaataagcttcataaaatgctcgtgtaccatatctgcatattcacctgtaagtgcactttccatatcagtgtatacaacaccctgatcagcaacctccttacggacattatggtatacaagctctgagtcgtactgtgctccaactccggctaatgactctctctccgccttaggaatacctaatctgtcaaatgtatccttaatctcttctggtacatccttccagtcacccttcatattcgtattggcacgaacataagtagcaatattatccatattgagtccatcaatagacggaccccagtcaggcacctgcatattattatatatctctaatgacttaagtctgaactctctcatccaagcaggatcatgcttctcttctgatatcttctcaacgatttctggagtaagtccctgctttattctataagaatcgttctcttcgttcttaatatcataaacacttctgtttatgtcatctacaaatgtcttttcttccattacaagcctccgagccttaattacttgatgaatctttcgaaaccattctcattgatatcatcaatcatagcactgtcgcctgttgcaacaacattaccattgacaagaacatgagtataatccaccttaagtgcctctaagatacgggtgctgtgagtgataataagaagtgctccgttctgagtcttctgatattcttcaacacctagcgatactgtcttaacagcatctacatcaagtcctgagtcagtctcatcaagaatagcaagagaaggctcaagcataagaagctgtaatatctcagctttcttcttctcaccacctgagaaaccaacattaaggtctctgtccatatatgatggatccatctgaaggaattccatcttctcctgaaggagcttcttgaacttgaagtatgtcatcttctttccacgctgctccatagaacttcttataaaattaccaagtgtgataccaggaacctcaataggattctggaaagacagaaaaagacctgcctgtgatctctcagcaacattcttagaaagtaaatcttctccgttaaatgtaaccttaccacctaatatctcatatcttgggttacccatgagagcataaccaagagtagacttacctgctccgttaggtcccataagtacatgagtctctcccttattaagagaaagatcaaccccatgaagtatttctttatcttcaacaccaaccttaagctggctcacatttaatatttcctgtgccataatgcctccttagctgtacattcttttagcaacacacataatatcattgaaagaaaaggttgtaaagttattcataataacaattgttactattgtttaacatagttacttctcttttgcggcttgaacccacaattccatctcccgtttctttgcatcattaatattgcttactatttcccttgcgaatatatcgtctgtttctttttctctatttcggaaaccatcgtatcttcatatatatatcttacctccctgagataatatataaatacaggtatctcatcactgtaatccttgctctttgacacaaccaactccatccacttatactcaccatcaagaagccgtctgaatatcaatctcaatgattttttattgtttctgaaatgctcaagcaccctgtctggattggcaaaatctctatatgtcccggcatcctcagggtgaactactcccatatcaatatatttgtcaatatattccttaatactgcctgataatccggcatctcttattatgtcctcctgggttgactttataggttcatatctgtcatgcagaaaatcagccctgagtatcttaataaatgtattatatataatatccattgcatcttctcttgcacctgcctgataatcagcttctttccatgtgaaaagcactctcctgttatcctcagaataatttgttggcttagtaacctcaaatacataccatttatatgttccatccatattatatcttatctggtatgtccctctttctttcccctcatcaagctgtttcttaattctgccaagattaatagcttccttgtaaagtgaaacatcatccgggtggataacaccatacttaatatatctgtctgcatattctgcaatagtcttaggtcttggtgtcataacataatcaggctcatctgtccttcttataaagtgatatgctcccgtatcaagatcaacatctgcaatcttccagaagtaatcagttatctccttaagataagacttatcattctttcttgtttttaaaataataagtttatcagctacgttgtccttatcatcaacaagcttctcataatcacttataggcataggtctgtaataatagtatccctgtgcatattcacagcccaggatttcaagcagcttaagctgttcatcagtctcaataccctcagcaatagccggaatatcgagctgtcttgccatatcaagaactgcagttataatgcttacacctttatcattattttccggattaaggtctagaaatttcatatccagtttcagaacatctgcatcaatatccttaagcatgttaagtgatgaatatccgcttccaaaatcatcaataagaatcttaaagcccgcattcttaaatgccttctccgtatccttaattaccgagccattctccacatatgcactctctgtaatctctatttcaatatactctgttgaaatattatatttttcaatcatgcctttaagtattcttacaacatccatagagtatatatctgctctcgaaacatttattgatattggcagtgctgttcttccctcatcaagccatcttcttatagtctgacatactttatcccatatatacacatcaagtttatttatgaatccattcttttcaagcagcggtataaactgtcctggtgaaataaatcctttctcaggacttatccatctcacaagtgcctcagaaccaataatcttacctgtctgtaatatacatttgggttgaagataaaatgtaaattctccattatccattgcactgcatatctctggcataagctttgcttctgcttcctgttcccttgccatactctcatcataccagaagatatccttatcagggcgctgttttgctatctctagcgcaccatacgcatagtcacacatctcacctgtagttatatccttatctgcagtcttatatgcaccataatatgcccttgtaatatcatgccccctgtatccgttaacaatacctgatattctttttctgattagattaatcacatcatcgttctcttcaaatataacacagaaattatctccacccatatatccggaaattgttccatacccggcatctatactcttaagagcttctccaatctctataagaagctcatcaccagtttcacgaccataccacttattaataaggtgaaaattctctatatctatcgccagtatgcaatatgttttgttatcaaaaagtactgttttatcagctattctccagaaagttcttcttaatggaagattcgtagccagatcataattatatctatcagggttaatccttaacttattgtacctgctcatgtctaccatagctgcctcctttgtaccctcaatatcttataagcccacgttgctcaaaataccttctccattttatcattattacattgataaaacaataatttaaatataaaataactatcaactggatatgtttaaaaaattatataaaggagactttaacatggcaaaatacataatggctcttgatgccggaacaacaagcaaccgctgtattcttttcaacagaagtggtgagatgtgcagtgttgcacagaaagaatttacacaatattttccaaaacccggctgggtcgaacatgatgcagatgaaatctggtcaacgattctggaagttgccaggcaggctcttgcaaatgtaggtgctaatgcgtcagatattgcctcaataggaataaccaaccagcgtgaaacaacagttgtatgggacagacattctggtgaacccgtatacaatgctattgtgtggcagtgcagaagaacttcagaatatgcagattctcttaaagagaaagggcttaccgaaacaatccgtaataaaaccggtcttgttattgatgcatatttctctggaaccaaattaaaatggattcttgataatgttaaaggtgtccgtgagcgtgccgaaaaaggagatcttctttttggaacagttgaaacatggttaatctggaaacttaccaaaggtcaggttcacgccacagattattccaatgcatcaagaacaatgcttttcaacattaatacacttgaatgggatgatgacatcttaaaagagcttgatattccaaaatgcatgcttccaaaggcagtcccgtcaagtagcaaattcggtgagacctccgctgaattcttcggctgtcctatcccaatcggaggagctgccggcgaccagcaggctgcacttttcggacagacctgttttgatgctggagaggccaagaatacatatggaacaggctgcttccttcttatgaatacaggagaaaagcctattttctcaaagaacggtcttgttacaactattgcatggggacttgacggtaaagtgaactatgcccttgaaggctcaatatatgtagccggagctgctattcagtggcttcgtgatgaaatgcattttatagattcttcacaggattcagaatacatggcaagaaaagttcctgatactaacggatgctatgttgttcccgcatttacaggacttggtgcgccatactgggaccagtacgcaagaggtactatcttaggaataacccgtggtgtcaacaaataccacattatacgcgccacacttgaatcaatcgcttatcaggtaaacgatgttcttactgcaatgaaagcagattcaggcatagaactttcttctcttaaggtcgatggtggagctagtgctaacaatcttcttatgcagatgcaggctgatatatccggtgctcctgtaaacagacctgtatgtgttgaaacaactgccatgggtgcggcttaccttgccggactctcagttggttactggaaaagtaccgatgacataagaaaaaactggtctgtagacagaacatttgaccctgaaatcactcagaatgagcgtgattccaaggtcagaatgtggaaaaaagctgtctcttattcatttaactgggataaataattccgttggatgattcttctgacacgtaaaagcgatattgtgtgaagtaaattcatacaatatcgcttaatcttttattaccttacaacactcttctggtttttgtgcattgcacgaaatttagtaatgttattttacctattatccaccttctctggatacatatcatgatttgccatacggttgaatgccacatcttcccacttagttcctggctttccataattacagtatggatcaatggaaattccaccacgtggtgtgaatttgccccacacttcaatatactttggctccatcagcgtaatcaaatccttcataatcacgttcacgcagtcctcgtgaaaatccccatgattacggaatgaaaacaggtacagctttaagctcttgctttccaccattctctcgcctgggacatacgaaataataatgtttgcgaaatcaggctgccctgtaattggacagagacttgtgaattccgggcagttaaacttcacgaaataatcattttctggatgtttgtttacaaatgtttcaagcaggccagggttgtaatctgtctcgtaattattctgctggttgcctaataatgttaaattctctttttctctcatagctttctccaatttttattttattgcagggtcacttaccccatttgctgcaaatgcagccgctctgtcgatacaggttccacatttgccgcaaggcacatcctttccttcatagcaggaccatgtaagctcgtatggtgcgttaagctctaagcccatcttcaccacctccgccttagtcatattcacaaatggcgcctccacctttaactgatgtcctgagccctcaaaaatcgcctgattcatagcatcattaaacatcggtgaacagtctggataggcaaaaccggctgaatcatctgcatgtgcgccataaagaatcacgctacagtccttgcttagtgcaatgcttgccgccgatgaaagaaacagtccatttcgaaatggcacataggtgcttacaggcttttcgccctccgtcttttcaatctgcctggcatagctctcctctggaatttcctctgtagactgctgcaataaagagcagttgctatattgaaaaatcttactcagatccaggaataactgctccactccgtaaaatgcagaaacagcctttgccgcctgaatttctttatcgtgcttctgtccataagaaactgacagagcaattacattgtcctttccatatcggctcactgccaatgccagtgccgtagtggaatccacgccaccgcttgataatactaatgctttcataactcatctctcctatcttagatacatttgtaatgctgcatcgtccttaaagcttcctcttaactctacagtcattgttctcgtgttgtttttcttaattcctcttgccgacacacagctgtgatatccttcaagcaccaccgcaacatcctcgcttcctgttatctctgccataatgtccgcaatatcctgaccgattctttcctgtaactgcagtcttcttccaaccatatcgcatattcttgcaatctttgataagcctataaccttcccattaggaatgtacgcaactgtcgccttcatatcatacataagtgccatatggtgctcgcagtaagaaaacaggtcgatgtccttcataactacaaccttagaagtatcaagctcctcaatttcatcctcaaatgtcttatcaaacatctgcgcaatttcgtgattggagtaattcatcccaagaaagacctcctcgtacatcttcgcaactcgctttggtgtatcctttaagccctctctctccgggtcgtcgcccaatgcaacaagaatccctctaatatgctcctcaatcgctttcgtatctatcatcataatctccattcttgcttcaccccgcaaactttgggctgaaagcacaaatttgcatgtgaaaaatctttgatattaggatttttcacattatacgcccctttcctctgggttccagattaccttgtgcatctgaatctgaagacgcaaatcattcatccttttaccggtcatgaaattcacgatttccactggctcaattgaaccaaacactgagcttatgaatacctggcatctttctgtcagatgaaatttttcaattattttctctgcacattccaaatcattaatgctgcccgaaacgaacttgactgtgtcctgctttcttagagcttccatattggagagaagcattttctcctcacagccgctggatggcagcttgtaatccatagtaaggctaagtttttcttttgaaaatgcattggcaaggggagcaatatcaaccgctccattagtttcaatctctactcgaatgtccgatttgttcaataatttttctactagactcctgatatccttctgtaatagaggctctccccctgtcagcgtcacatttttaatgcctgtctcactgacatattcacaaatctcatctggtgacagctcctcgtaatcacaagctggctcattggcccactttgtatcacagtaggagcaattcaggttacaacccttgaatctgataaacaccgccaattctccggctcttcttccctctccattaatacttataaatttctcaacaactttcatattagtttctttcctttattcttcgtatgctgctacattattaggtgtctcgtatacttccactctgtggattggaaagccttttgcactcatcagctcatagaaatattttgaaaaatgctccgcagtaggtctgaagccaacttcaatcatacgaaactcctccgcctgtaatgcagcaattgtcgcaccttttagagaacctttttcataaatcaggctgtggtcaaaatcatcacagatatccttcaaagcattttttaaatcagaaaaatccacaagcattcctcttgtctgaccctcatcctttaactggtctgctgctatttcaacaacaactctccagcggtgaccatgaagattcctgcattttccgtcataccccttcagaaaatgtgcagaatcaaagctgctctcggtttttaaataatacattttagtttctcctctaatttattgggaataaaaacagaattgcttagaaaagaacgtgccccactgtgagcacatatagaaagccctgtaaatgtatacacacctacagggctaaattacataaaaagtcttcttagcagccctggttttatttaacgacaggatggtacaaacgaactgtcgcgcatttttatgcgatatgtctattataagtatttttctggatatgtcaatgtaaattttcccccagcagctgcacctttatcacgttcattatgcgtgccgggtatgtttcctgaatttctcctgcaattgttattgaaaccatatcatttactgccaggtcagacagctcaatctctgtttcctccttcgtccatgaagttttatatttgaccctattaaaccaatcttaaaccgattaatcttttaatatatcttatcaacctcatcttcatacactgattcagtatgagtatcaaatagcacccattccaccagatcaaaacaatctggattatcctgcaagaaccggtttactgtatgtaccgcaatctttgctgccaactcaacaggaaaactatatattcccgttgatattgaaggaaatgcaatagacctgattccattatccattgccagcttcatagaattaaaatagcagttagcaagaagctcctcttctctatctctgcctccattccatatcggtcctacagtatgaataacataatcgcatggtaaattataggcttttgttatctttgcttctccagtcacgcatccgtgaagtgtcctacactcagccagaagttccggtcctgcggctctatgaatcgcaccatctacaccgcctccgccaagaagagagttatttgctgcattaacaattgcctgcacatctgttacttttgttatatctccttttactgtcttaatcaaatacatctttcttacctgcctgtttattatattacctctgccccaaatggcatcagagacaatttagcaattttgaaaaactgctttccgaaaggaattccgataattgttatacaacatatcagacctgccaaaacccacgacagtccactcaacaatccaccacatataaaccaaagtatatttcctaatatgctcatatcaatattccttctctatctctccatatattccatacattttcttgaacgcatcaaggtctgcctgatttttaatcagcataacctcctctatcttacctgtatgaatgtccttaaagcctgcaacctgctcaccattacatatgcttgccttgattactggtttcttattttctttatcatatgtctttataactgtctttttcttaaagaatcccactctgagcaccttcttttgactttgccatcagtataacaactgcctataccattcatccttcgtcatatcatcaccacaaattgtatggtttcatggtttctgaatttcgatattcatgtttctcataatatcctatcagcttactctcatctctgagtgccaccatgtaaacatctttattctgtttctcattatgaaaagtataaacgatattatggctttcatctgctgcaaaccagtccactacctgctgtattttatctcttgattccggactatgacaatctaacaaacttcttccaataagtttatctccgcctcgcttcgcatagctggtaacagctgccggattcatgtagataatctcatgtttgagattgcatataacaacggatgccctgtcctgatcaacaatactcttataaaagctgacataggatttaaacttaattaccttttcattatccagcctcttttgaagttgtggtttcttttttcgataataatcgtatatctctccatcaggtatccagatttgtgcctcatttatcttatcaagtacagcttcaacaatctgttcatctgccagtaaatcaggtactttatcatgctctgttacatactttttgtattcttcatacacccattctgtaatcttatccttctgcttcatctttagattactaaattgtttgttcatctgtaaaatctgaccatcaatctttttatgtattttagttttcttactttttgccatcttcagctatcctttaaaacttcactatttccggttcatgggtaaatgatgagaatgtgactgttgcattcttgaaatagaatacctcggtatttccatcatctgctgagtacatattctgtaaagatggataagcatcaagcatagactgtcttgcttctcttctgtcatcttctacaagttctccggctacacgaagccactcgccatttttaaatgcacaaatttctaccttcgggtttgcgtgaatctgctttgaaacatcctttaccttgccagtctgaatatacaactttccttcaaaaatgtgtgctgttccaaaaggtcttacccttggctggtcgccttctactgttgccaaataatatgtctctgcttcttttaaaaatttagctactcgttccatgatgtaatcctcctgaattgattaatatcgtttcatatttacaaacagtttcattttattggttataaaagtatatcttcaataaatctattgttgctttgtcatttatgacggcccgtcctattgttatgccattgctgatgataatatattctccgttttcatatctggcatttaccaaatcatcttccccttttaagtctatacatatacttgatataattccgcaaatctcctcttgtgagcttccgctttttatctcataagcataatccgcatctcctatctcattcagatcagttaccaaacaatactccgctccattcatcagcatttcttcattcaaagtgagtaattgagccgtcttatactcattaaataaaaagataactacaagcgcaatgaatgccggaaaaaagataccgccaaaccgctgtgcataattttgttcttcccaccgcttgctatgacgaccaaacagcggtattttcatctgcaccaaacttgctcctat

SEQ ID NO: 8504 - DNA, 196499 bp, Unknown
  gut microbiota DNA sequence
tgttttaagtcttatttgttaccgcttaccgcggcgacttgtatataatatcatcaggtacacacattgtcaacaacttttttcaaaaagtttcaaaaaagtttaatttttctcaaatattgacatttaagtagaacttacatgcctgtgaaaccgcttgtttactggctttctgcacatttacactgtaatcagaaagcaaagacctactgttatattcctgtatgcatttttagtaggtcaattttcttgtcaaccaagatttcttatatagaaaaacctactcaaacatctaatacaacttattgcgtaggtcaatttcaagtaatatgtcgcttcattatatgaaatctgaagaaaaagacctactaaagtacaatgcttagatactttagtaggtctctgctctgaaaccatagcaacattataagaaaaacacccactaattctgttatccaatagcttttagtaggtgttcgccccgtaacacacccagtaatgccacataacacatcaccgtagctcataacattagctaatcaccatagcacatcaccgtaacacatccgcttaacacattttctcagcccaagccttaatcagccctcaacacagtttcccccattacaggtcaaacagtgacaactggttgctgtctgtcatatctccaagtattccaagctctgaaagcttatcaatcgctgactgtcctatcttggctcgctggcgtaagtcatcctttgataagaattcaccctctctggcggctatctctattgactctccggcgacttcacctacctttgatataaccttgaatgatggcataatctttccatcaattatctggaatgttcttgcctttgccttatatatgtctataggtgtgaattcatagcctcttgcatgcatttcctgaacaatacgcattacaccaagttcatcttcttctgtattagagattgttccttctgctttcttggctttgtactcagcaatgtagtgttcaagccttacagggctcatagccattttctcatagtcaaatgctgtggctcttatactgaaataagctgtgtaatatgcaagcggatagaacaccttacagtatgcaacacgccatgccatcataacatacgccgcagcatgtgccttagggaacatgtacttgattcgctcgcatgaccatatataccagtccggtacaccatggtcaatcatatcctgcttccactccggccattctttacatttgccggatgcgaccttaccctttcggaccatttccattatcttaaatgattcctctgaatcaagtcccttctggataagatatatcataatatcgtctcgtgtacatatagctgttgaaatagtagcttttccttctttaataagagtctgtgcattgccaagccatacatcagtaccatgcgcaagtcctgcgatacggacaaggtctgagaaatactgtggcttagtatccataagcatctgcatagcaaagtcagtaccaaattctggtattccaagtgctcctaactttgtgccgcctatatcctcaggcttgattcctagcgcagaagtgttctggaacagtgacataacctctttagaatctagtggaatctcaagagggtcaattcccgttaaatcctgtaacattcgtatcattgtaggatcaagatgtcctaagatatccagttttaacaggttgtggtcaatactatggtaatcgaaatgtgttgttactatagatgtcgtcatatcgtttgcagggtgctgtaccggtgtaaatgaatgaatctcttcaccaattggaagtacaacaattccaccaggatgctgtcctgtagttcttctaatatcaatacagccttctgctattcgttctatctcacattttctcttaacaataggaggcttgccctcaagtgcattctttgctgacttctcctcaaagtacttcataacgaaaccatacgcagtcttttctgcgacagtaccgatagttccagctttgaaggtctgcccttttccaaagataacctctgtgtaggcatgagccttactctggtattcattggagaagttaagatcaatatcaggctctttgtttcccttgaaaccaaggaaagtctcgaacggaatatcaaatcccatcttattaagcttcgctccgcattttgggcatatcttatcaggcatatcgcagcctgcgcctccagcaaatgctttgacttcatctgaatagaaatcattatagtagcattttggacacagataatgcgggcttaacggattaacctcggtaatacccgccattgttgctgctaatgaagaaccaaccgaacctcttgagccaacaaggtatccgtcatcattagacttccacaccagtttctgcgcaattatgtacataacggaatatccgttagagataattgagttaagttctcgctctaatcgctcagttactatctgtggaagctccggaccatatatctcatgagctctattttcacagattgttcgaagcatctggtcagagttctcaatgaacggaggacatttatccggtcttacaggctcaatctcctcacacatatccataatcttattagtgttggttacaacaacctcgtatgccttgtcgcttccgagataatcgcactcatgaagcatttcttcagtagtatgaagatacagcggtgcctgattatccgcatcatcaaagccttttcctgccatgataattctacgatacacttcatcctctggatttaagaaatgcacatcgcaggttgccacaacaggcttgccgaatttgtcgccaagttctactattttacgattcagattgcgcaaatcctcctcattctgaacataacagtcttctttctcaatcatgaacctgttattgccaattggctgtatctcaagatagtcatagaaattaactattcgcgctatctctgcttctgaacgtccatttacaaggcttctgaaaagctcacccgcttcacacgcacttcctataataagaccttccctatactgatttacaagactcttcggtatcttaggaaatctgttaaagtactgcaaatgtgatgctgaaacaagtctgtacagattaatccttcccatctcattagaagccagaattatacagtgatactgatgaagcttcttgatggcgttctcatccatcttaccttcttcattaagcttatcaacgtcaggaatgtccctgtcgtaaagcatttttatcatcttgacaaatatgtctgcagtcgcagcagcatcgtcaaccgccctgtggtggctttcaagtacaacattaagatgctttgtaagcgtatccagcttataattatgaagatttggcataagaaactgtgcaagaagcacagtgtctataatggtagtatccacatttataccaatcttctctgccttattgattatgaagctcgtatcgaattccgcattatgtgcaaccataacagcatcctcgcagaattcaagaaacttaggcagaatctcctctatcttaggtgcattcataaccatctggtcattaatgtgcgtaagtgtctcaattctgaatggaataggaatctcaggattaacaaatgtagagaatctgtccactatctcaccattgcacaccttgactgcacctatctctataattctgtcaacttccgcagaaaatcccgttgtctcaagatcgaacacaacatatgtatcgttaaagctctgtcctctcggattcgttactatctgcttggtatcatcaacaagataagcctcgactccatatattatcttaaaatcaagcttctcacccttcttggcataagagcctttgaggtcgctcatcgtatggaatgcatctgtaaatgcctgcacaacaccgtggtcagtaattgcaattgccttatgtccccatctgattgcctgtttgataatatcagatacataagacacgccatccatatcactcatcttggtatggcagtgaagctcaactctcttatgaagtgcgaggtcattacgcacctgtcttgtatcagagccttttcttatgccccacacattggcaattgatatttcctggtcgtacttgtcaaatgtagcatttcccttaatctttaagaaattccccttcttgataacccctgaaagctccggtacctgctcattttttgcaaatacctttactgtaattgtgtctgtaaaatctgtcacgttgaacataataatagttctttcgttacggatttcacgcatttccacattacggaccataccagagataataacatctccgattgccgtatctatctgttcaatcggtgttacatcaccgtcaaaatctcttccatataaaacatcttcgttagcaggctttctgttgtatgtcttaagctcttccctgcctctgttatcgcttgcaaaaaatgctgctctagccgccttctgctttgctgctgtctcagctttcttagctgccttctgttcagaagtaagcttcttatcatccctgccgtcggcattatcttctgctgccgccatcatattattctcaatttctttgacacgaagattaatcctgtatgcattttctctctcgtactggctttccttcttcttggcatactgatactcaacatctatctcaaacccgaatctgttcaggaatattttcttgaaataatctgtcagtgtatcagcatactgatgtgcaaggaaactgtcctcaatcgtgaatacaagcatatcctctttctcaaactcccactgggaattctttaaaagattatattcaagtgtccagtatttctccagctctgctaagatactgtcataatatatatccattacagtctgcggcgtatactgtgctgataaaacatatctatcgataatccgcacatccatgttagaaatacgaaatatctgcttctttaatgcatcctcaaccttgaatattattggtttttctattaccctgtcactctttatataaacgcgtgccagagaattggtcgatgttttcgagactttagttacttcaacattctcaaaatacaccgccagatcctctggcagcttcagcgtcttaaacacttcaaaaaatctgtacatatgtatcactcattccaattatcaagttcatacctgagtgtatcaagaagttcctcttctggaaccttcttaataatctctccatgtttaataagtactccgcagccgtcaccgcctgcaattccaagatcagcttcctttgcttctcccggtccgttaactacacagcccattacagcaagcttcaagtcaaggtcatacccggaaaccattttctcaacctttcctgcaaggtctataagattaattcttgttcttccgcatgtagggcatgaaacaacctctattccgccttttcttaagccaagagtcttaagtatcagtttcgcagcctctatttcccttacaggatcatctgtaagcgaaactcttattgtgtcgccaattccctgattcagtataagaccaagtccgattgatgacttaatgcttcctgagaatattgttccagactcagtaattccaacatgaagcggatgattagtctgttttgcaataagctcatgtgctttaacacacatcattacatcagaagatttgatgctgacaacaagattatcataacctaagtcttcaataatcttaaccttgtcaagtgcgctctcaacgattccctctgctgttactccaccatatttctcaataaggtctttctcaagtgaaccgctgttgacaccaaccctgattggtatatttctttcctttgcaacatcaacaacagcctttatcttgtctgttccgccgatattgcccggattaattctaatcttgtcagccccattctccattgccataatagccatcttgtaatcaaaatgtatatctgcaacgagaggtatctctatctgcttctttatctctttgattgcaagtgcagcttccttagttggaactgtgcatctgatgatttcacaaccagctttggtaagctccttaatctgcgctactgttgcagcaacatcttctgtatgtgtattagtcattgactggataagaataggattgccaccacctataacacattttcctatcttaacaactttagtattatctctgtacataacccctgtgtcctttctgtattagaacaatgccattatatctttaaacaatacaacaaccataagtatgacaagaagtatcatacctatgaaattgacaattccctcatgttctctcttaaccggcttgcctcttaacgcctctattataaggaatacaagccttcctccgtcaagtgccggaattggcagcagattcataactcctaggttggcactgataagtgctgctagattcataagattaaggaatacataaaatgcaccatctgccttactttcttcaacaatctcactcattgtgctgacagttccaacaggtcctaacaatgaatcgaatccaatctttcctgtaaataacattccaagactctgtattactgtcttgacactgtatccgacttccttcaccgaatacttaagagtaccaataggagaagtctttactctgtctccatacacaacaaagcctgtatcatagctttcgacttcaaccatcttaggctcaactgtcacatcaacattttttccatctcttgcaaccgtgaatgtgacactgcttccaccacttgatgtaatggcttctgtcacactggaactgttctccattgcagtcccatcaactgctttgataacatcattagctttaagtcccgccttttcagctggagaatccttggtaactgaacttatgagacaattctcattcatcatgattccaacctgatacttctgctgcttaatatgctgcggagtaacagttgttgtcatcttttcaccgtctcttgtaaatgttatgttaagagtcttatctgcattataagccctatagaaataaaaatccctgtaaaatgtcaccttatgtccattaaccttagttatgacatcgccttcctgaagccctgcttctgtagctggtgaattatctttaataacgtcaatatcacatggatcatagccaagacttccgacaataactactgcacacacgaaagcaagaagaaaattaaataccggtcctgctgctataacagcaatccttgcccaaaccgatttgcttgcaaatgacttttccatatcataaccattctcgatagcaagctttcttttcttagcttctttttcttcatccgtaagctcttcgtcattatcttcttctgactgtataacactcatctcaaggaactcatcgccaagcatcgtacatgcaccgccaaaaggaagtgctttaatacaatattccgtctcaccttttctgaaatgtatcagcttaggtccgaatccgattgagaattcaactaccgttattccattagccttagctattataaaatgtccgaattcatggacaataacaattatactgagtacaagaatcgccagaaatacattaagaaccaacttctaccacctgctttctatcatgtctgttactatcttctgtgtagaaagaatctgctctacagttggattattaatataatccacttcattcatggcgtattctataatatccggaatatccagatattttatctttctgtctaaaaatcttgctacagctacttcattggccgcattaagcgcagtcgggatatttcctccacgagctgctgcctcataagcaagcttaagtcccttgaaagtctccatatccggcttttcaaatgtaatattagccagttcgtagaaatcaagtctttctgtgttaagctctcttctttcagggtaataaagagcatactgtataggaagtctcatatcaggacttccaagctgtgccattacagctccatccttgaattcaaccattgaatgaattatgctctgtggctggactataacctgaaccttttcggcaggtactccaaaaagccactgtgcctccattacctcaagccctttattaaccatagtagaagaatctattgttatcttgcgtcccatagcccagttaggatgcttaagtgcatcctctaactgtacattttcaaggtcaactcttttctttcctctgaatggaccaccagaagctgtaagaagaatcttctctatctcgctgcgcttctcaccgttaaggcactggaatattgctgaatgttcgctgtccacaggatatatattaacattacactccttagcaagactcataataatatgacctgcacatacaagtgtctctttattggcaagcgcaatgtccttatgtgccttgatagcttcaactgtaggtgtaattcccatcatacctacaaccgctgtgacaacaatttctgcactctcaattgttgcagcctcaataagaccttcgtcaccacttacaatcttaacatccatatcaccgataagagtctttaactctgaaacaagttcttctttacctatacatacaagctgtggcttgaattcacggacctgttctgcaaggtcagcaacccttgtgcccgctgcaagtgcaactacgttaatatcagcatttcttctaataacatctaatgtctgtgttccaattgaaccagttgaaccaagtatcgaaacgttcttcattatcaacctccaaagactttgttaataacctctattgcccagtaaacaacaggtgccgtgaatattgcactgtcgaatctgtccataattccaccatgtcccggtattaactttccatagtctttcacatcatgatttctcttaatagcagatgcagccaagtctccgaatatagacaggaatgcacctatgaagctggctattgcaaatgtatatacaggatgtacaattacatctgacatcttagagcttatggcaaatccatatccaaagccaagaagtgtcgcaccgacaactccacctattgcgccctcgtaagtcttcttaggtgaaagctttggagtcatcttatgctttccaagaaatacacctgtgaaatatgcacatgtatcattgccccatgaagacacgaatataagccatacgatatatattccgtcctgcagcattcttacctgatagatataagaaagtgttacagcaacatacactatactgaagaatacccacataacatcttctgtcttatattttggaaatgtaaatacatatactgacatcataagtatgcatgaagctacaagaagcagtaaaatatatgccggatcattaagcaaaagaataaaataataagtaattgccgctatatatcctacaactaccagtcctgtcttctcaagcttcttaactttaataagctcatacattccaacaagtgaaataaacagactgaacccgaatgtaacccagcctccaaaatacaggcatgtgaaaagtatgactatgagcacagctccgctcataattcttgtacgcataatctactcctccttaactccgccgaatcttctttccgtcttattatatttctcaaatgctttaataagttcttccctgtcaaaatcaggccaataaatatctgtgaaataaaattctgtataagcaagctgccagcacagataattagataatctctgctcaccgcttgttcttataagtaaatctggatctggcaattcccaagtatcaagattattacttattgtatcttcatctatatcttcaggcttaagacttccttctgataccttaccggcaatctttcttaccgctcttgttatctcatctcttccaccataattaatggctatagtaaaattaagccctgtattattcttggttttctcttcaagattattgatactgtctataatatcatggctgagttcatcttttcttccaataaccctgcatcgcacattattcttcatggatttcttaacacaatccttaagataagttcttaagattcccataagagtacttacttcttctgttgaacgtttccagttctctgttgaaaaagcatatacagtaaaatactttacaccaagctcatctacgacataaagcatatcttcaacaactttgcttccctgcacatgtcccattgttcttgggagatgtcttttcttagcccatcttccattaccatcaagaataacggcaacatgccccggaatctttaatccgagactctcgttaaatgtatccatatctatgattcctctcgcaattcattcaattacaaaaaggctgttgtaaaatatccaacagccctgacattttcttaaactgtaagtatctcttttgtcttatcatctatagcactatcaatcatagcaatatacttatcagtaatcttctgaatttcatcctctgaattcttagcttcatcatcagagatatctcctgccttgttctctttctttattgcatcgttggcatctcttctgatattacggatagcaaccttggcattatcacccttcttcttgatatccttagcaagttcttttcttctgtcttctgttaattcagggaacacaagtctgattgtcttaccatcattgttaggtgtaagtcctaaatctgaaacaagaattgctttctcaatatccttaataaggcttgcttcccaaggctgaatctgaatcattcttgcttctggtacagaaacattggcaacctgctggattggtgtaggtgttccataataatcaactcttaatctgtcaagaatatgtgggttagctcttccggctcttattgttacatattcttcctttaagttgtcaactgacttctgcattcttccttcaatatctttaatattttccataaaatcctccattaatattatattaatcaacagttactactgttccattaaactttcctgataaagcattaactatgctgttctcttcttcgagtccgaataccataagaggcatcttattctccatacacataactgaagctgtcatatcaataactccaagcttcttctcaacaacttcgttgattgagattgtatcatacttcttagcctctggatttagcttaggatcgctgtcatatattccatcaatcgccttagcaagaagaatagcatctgcatcaagctcaatagctcttaatacaatacctgtatctgttgagaaatatggatgacctgttcctcctgcaaagaatacaaccatgcctttctcaaaatacttattagctctgtccttagagaaaagctttgtcatgcttccacattcgaatggtgtaagaatattagtcttaagtccctgtgaacggaatatctctgaaacatatatacagttcataattgttgcaagcatacctatctggtcagccttagttctgtcaatattatcattagaacggcctctccagtagttaccaccaccaataactacaccaacatctgttcctttattaactattgtcttaacctgattagcaatattctctataagctcatcattgtagccgccctctttcttagcaagagcctcaccactaagtttaagtattactcttttaatgttatccatacgtgcctccagttatttattcttttttcctttaatgtcaaatatactttccatattaacatccgcataacactgtgagcagcgtccgtcaattgttgctccattattaatctgtactgactttgacttaatatctccagaaattatagcagatgaatcaattatcacaggtccatgtacatctatatcgcccttaacagctccaccaataaccgcagatgtagcagttatattacctacaactacagttccctgtccaatctttacagcaccttttgcctctatatcgccatcaacctgtgcgtcattcgcaaaaaattcgttagctttagaacttcctgtaatagaaccgcttactgtaagttttcctctgcatgtaacattaccttctactgtaccaaataaatcaatagaacctaatgagtcaagatctccctttattgaaagtccctccgtaataactgcagtctcatcagctatatattcaggattctctgctgcattctttatatcttcttttgtctcatctttatcagacacatttcccatatctgtttctggggaagaagtatcttctgacatatcatattcctgtgcttccatcttgaaagcctctgccatcttggcaagttcaggatcatctaatgtatttaccattacatcatctgagtcatcagatgccttattagtatcatctggtaaattattgactgattctgataaatcatctttcaaatctttaaaaaataatcccatcaaattatcctccatatcgtatactgcagttttacacaatatcacagtttgataagattatagcatatgcacgacaaatttagaagtcttatgacaacattttgttataatatcattctaaaaaaacctccagagtcttatataaactccggaggatttttaatactcaccgtatattataattaaatattactgtaactgagctgcaacttctgctgcaaaatcttcgttcttcttctcaagaccttcaccagtctcaaaacgaacatatcccttaactgtgaaagcaccattagccttagcaacttctgcaaggtacttagcaactgactgctttccatcctcagccttaacataaacctgatccataaggcagatttccttaagctgcttagatacacgaccttctactaatccattaaagatcttatctgctacgatattagcctcatcagctaatgcaagctctgctaactgtgcagctgcttcctttgaaaggaagttgaataagtactgcatgttgctcttatgctcttcgtatgttgcaatatcagcatcgctccataccttatcattaatagccttatcaattaacttgtttaagattggctttggaagagaagctggatcatttaatgcactcttctctgtaatctctcttaacttagcaagttcatctgctgacatatcgtttctgctaaggtactgtgggttcatagctgcaatctgcattgctacgttagtaagtgcttccttgattgcatcattagaagcgccatctgctgcaacaagaacaccaattcttccgccaccgtgaatatatgaagctacacagtcacctgtaatcttctggaatcttctgatagaaagcttctcgccgattgtaagagtcttctcttcaagttctgactgcatatcaaggatagcgcatacatcttcgccatctccagccttatcaactgaagccttaagtgccttgtcagcaacagcctgtacaaattcctggaatgtagcattcttagccacgaaatctgtctctgaattaacttctactacaactgctgtattgccttcagatgcaactcttgtaataccttctgctgcaattcttcctgccttcttctcaaccttagctgctccgctctttctaagaacatcaacagctgcttccatatcaccatctgtctctgtaagagccttcttacactccatcatacctgcgccagtagactctctaagttccttaaccattgctgctgtaactgctgccattatattatcctccaataaaaataattttaaaaatgcttcaacctgataatatgtcaggctgaagcatacataaacttaagtcaatacttaaatattaagcttcctcagctacttcttcctctacagctggagctgcttcttcaccctgattagcttcgataactgcatctgccatcttagcaacgattaacttaacagctctgatagcatcatcattaccagggattacataatctaattcatctggatcacagtttgtatctgcaataccgattaacttgataccaagtgcatgtgcttcctgaacacagattctttccttcttaggatcaacgatgaagattgcatctggaagtctcttcatttccttgataccaccaaggtttttctgaagcttctcaagttccttcttaaggttgataacttccttcttaggaagaacatcaaatgttccatcttcctgcattgtctcgatttccttaagtcttgcaattctgctctggattgtcttgaagttagtaagcataccgcctaaccatctctcattaacataaaacattccgcaacgctctgcctctgtagcaatagcatcctgagcctgcttctttgttcctacaaaaagaattgtaccaccttcagcagcgatatcagagattgccttataagcctcgtcaaccttacctacagacttctgtaaatcgatgatatggattccgtttctctctgtgtagatgtactcagccatcttaggattccatcttcttgtctgatgtccgaaatgaacacctgcctcaagtaactgtttcattgaaattacgctcattttgatacctccattggttaattaatcttttgcgggcttcttctttttcggccaccggcgcgtataccggcaccagccgtaaaatccaccagcatgttttttcacacaaaatgcattatatcaatacattcaatataatgcaagcatttttttaatctgactgtgttattgttctagcaatagtctcatatgaatctccaggcttaagagaatactcaccatctctgattctgacagcatatcctgatatatccatatatgtatagaatgccagcttatcttcgattattcctgcactatacaatatatctgctgcctcagatgcagttcctacacccttgaattcaatctggactagtccgcttccatcaccgataacaatacttgccgtaggtctttgtgactcagtttctcttgccaccacagccgtcgtagtttctttattaacctgcgtcgtctcttcatctgactttcctgtagttttctgcgtttctttctctttgttatccgtgctttccgttgtaaatgctataacagaaccactgctttgcgtctctttattatcagaaacaatgtaattattattcttttctatcatacctgcaattagaagaacagcagttgcaactataagaccagctccaaaacctcttatataatatctgaacttcattgttgtttaccacctttatacagattaatcacaagccttacttcgccaactcccatattaagtttcttagcaatttccttaacagatacaccggatgcattcatctggagaattctttcattattcgaatattctttattaagactgtctgcctgtgtattaattctgtcttcagcattcttagctttctgattgcttttctttactaatgctgcaagcctttcctttgctatatcctttgtatctttaccagacttaaccgcctgttcatatgccggttctttcccatcacctgtgcggtcctgttcatgttcttctgacaggactgcattatcagacatatcagaagttcttccactaatctgttcaacctgcttttttgcataattaacatctttaaccgttgtctttacttcttttgatttttcattaagcatgtcatacaaaaaaacagcttcattatgatttctgttaatctcaccaagcacactctctgcatattcattcatttcaagaatcttggtgttagatatcttatcaagtgcagcttccgttttttcagacagaccacttatctgctgcttaataacctcgtcaacctgatgttttaccatatcaagctgtgcctgtgtcagttccgctttagcactgctctccacattctctttatcatctccaaaactcataacaacgctgacaacaacacatattacgccagccgctataagaaatatttctgttgcgaccattatatcctccacacctcattgtttcatatctttacatcaaaatcagcacttccctgtccttttacaaagacttttccatcagatttctttttcttccgtgaatccccttcgctggaatattcattattactcttatccttggcatcatatttaccagtttcattatcagcattatccttcttattaacctgctgtgagtgagcattgatgtccttctgaacctgctgcgttatagtctgctgctctgtcataggcctgttttcagcattatattgtgatttggcaacattgttctgctgttgtatcattgcaaattccaccggtttaataaccatattctgcctcctgtatcaaatgtgtctaaattggcgcactttttatatctgcaccctctttaacaaactgacagtaatcatatttctgtttaagaaacatgcactggtcaccaaatgtaagtttaacaccagcatacgctgcatcacttactttaatgcatgcatgcttttcttcgcctatctgacctcttaattcttcaagctctttcttttgtttattaatctcctgttcaagcattatgacattgcgcattgttttcatctgtaattcgtgctttgcttcatcaagcccaccctctgcatcctgtttctttcttaacgcattgagtagctggttaagctgtatcttattatcacccagttttccaaggctgttctttaattcatctactcttcgtttcattgacggatctactccaacgccaacagatgtgtttgttcccatggcatttcctattgtcttagcctctatcatattaacagccttaacatctccgcctattataagtccgttacgccctgaagccttaattgtactcttagctgtaactttgctgtgcagaattgaatccgcttcgatacttccacctgctgatacattttccgcactctctatgaatttggatacaatattgccgccagccttgacaacagcccttgtcattccctggattcctctgttaaatgtaatatttccccctgctattactgtagccccttccacaattccactcacagtaatatctcctgttgctttaacagtaaatcctgcaagaacattgcctttaactacaacatcaccttcatagtcaatatctcctgtggaattatctacattcactagttccaatacatttgaaacaaatatcttatcattctcaagtatgacatgtccgcttacctgtgacataagctctgttccatcctcagactgtgacagatttcttccatacctgaatattacatgcttaacttttcttggaggaactctccttccaagaacatctattccgtcatctcccctgtcttctttatgaagtacagcaacaacatcacctttgttaacatgattaatattctcaagtgtatgaaaatcaactgttccatcgtcattcatcttagggcgtggtttcagttctgtattaaacttatattcaatatatccgtcgcttccatctcttggctgtgtaccgacagcaatcttataagcctctccatattctctatggcttaatatctgttctataatctgattatctataccatgtttcacaccaagatactgaagatccttaataatctctcctgaagtaagtacgcctcctccaacaaacggtggatagaatacagcttcaactttcatgcaatctgcacttatcctgtaatccccgaattcagaatactgatgtaccttctcatctgaaaccttaagttccgtcttcgtactgctccctgccctgactgcctgcgccagcttagccgtgtcgcattcaatctttttcttatcaagataatacataacatcatctatgtttgcagttctgcctccattctgtggcggatatactattatatataacccgtcgtttcttgaatcaaactgaaaataccctgttgtgcatccttccaccatatgctgtaaccccttttacatacttatattaaagagaaaatacataatcaccaagtattttcttcatcttattcaatgctttcgtatgaagctgtgacacccttgactctgacacttcaagtgtgagactgatttctttcaatgtcatatcttcataataatataaaacaacaacacttctctctttctctgtgagagaatctattgctctgaccatcattttcttaagttcttctttttctatagcttcctctggctggtcaaaatgtgaattaccaacagactccatcttaacctcactgcctgcctctgtatattcatcaagtgatataagattagatgctttcatctttccctgccagtccgccagttcatctatcgtaatctctaattcagcagcgagctcctcatcacttgctatatgacctgtttcactttctatctttgccatagcagcttcaattctcttctgcttctgtcttagagatcttggtatccagtccatctttcttatctgatcaagaatcgcgccccttatccttaagctggcatatgtctcaaacttaacattcttgccataatcaaacttatcaattgcatctataagtccaaatattccatatccaacaagatcatcatattccacattatatccaagatacatattgagtcttccagcaaccagcttaacaagctgtgcatactcaactatcaactcatccctgtattctgcactacgtgtggatatgtaattcttccacagtttatctctgcctgcctcatccatggtcagtgcccccaattaataaaatatactcagataataacacaaaatctgcccaaatgctacaattattcttgctgggcagattcctccatattagatacatcttctttttcttcgtcagatgctttttgtttattctctttcttttctgctactttattaagtacaaatcttataagcattccgcatatataaaatgcaagcataacacatataagtatccacataaaattaaccagtgtatatctgtattttatcatgataacactggttataaaccctgccagtaatgttattatggctggtacatttctgaacttattcataaagcctccactcgcaacaattatgtatcactaaaatcatatggtttttagcggttttcctactgctttaataacatagtctcctgtttccgaataaaattccactgttcttccaaagttttctccgcagtcctgagaaagtatacttatattaaggctttttagctttgccttaaccgcaataacattgcgttctcctaccctcaacgcttcactattagatctgtttgcaaacatctgagccccaccggcaatctttgcaacaattcttgtatcaaccgctcccagtgctttcatctgtcttataagttcatctatgccagtatctgcaaatttagcaatattagaattatttctaaactgggtactatccggtaacatacagtggagaagtccacctattttcgttaccggatcatataatgcaactcctacacatgaaccaagtccaagtgtagtgagtgcatcaggacatttgcatgcctttaagtcagccatgccaacctttatcatgtttcccataatcgttactctttcaaatatatcttttacacacctaaagattctaacaatttgtcatatgactccagttctggaatcataagaaaatatccattaacaaaatccagttcaccaaactgtgactgtataagtagcagtttgtcaccatatttaccaaattctgaagctggaacgctaagcaatgctcctatcatatctattgtcatttctggaacagtagataccatcttgaggttagtaagcttagaaattgctgtaagatacgaacccgatacaatattacctatttcattaagagcagacatttccatgtcattaaactgagtatctgcctcaatacctgactctgtatcctgcatcataagtgtattaacaagatgatgtgctgattttgtatcaaaaagaaacatcatcattccatacacatccccctcaaatccaagcataataccaactactgtctgatcttcatctcccattatatctgatatttcattaaaaggaacaagttcaaccttaggtactgacatatccatcttttggttgagcatcttcgataatgcagttgttgcatttcctgcacctatattacctatttcttttaaaacatcatactgaatatcattaagctgattcaaatcaatttttgacataccttcacctcaaacactaattattttctacaataaggcttacaatatccagaagtgaaatcagttccccatctttctttcctattgcattaatatagttagctgccgcatcatcattagttgatctgcttatacgctctatatcttcttcttcaagtgtaacgacctctttaacctggtctactataacaccaatcgaagccccctcaacctttactattataaatcttgttttatctgtaagctcatccggctctaatccaagtttaagtctcatgctcataattggacaaatctcgcctcttaggttaataacacctttataatatgactgtgttttaggcactcttgttatgttctggcttcttacaatattgtcaatatatttgatatcaattccgtactgctcattacctatcttaacaacaatatactgtacagaagttgttgattctgaattcttatcttctatagcattaacattctccattatccgttcctcctctatacaagtgtattggcatcgatgataagtgcaactgaaccatcacctaagattgtagcaccacttatcatgcggttaatattaatgtacttaccaagtgacttaataacaatttccatctggccaataagattatctacaacaagtccggcaagcttatctcccttacggacaattactataactatattgtcagactcttccggttcgccaggtacatcaagaagttctcttaatcttataagaggaattacattgcctctaagattaataacttccttagcatgaacatatttaatctcgcttaccggtacatcttcaattgtctcaattgagccaagtgcaatagcgtatttttcttctccaactttaaccataagtgcctgaataatagcaagtgtaagtggaagtcttatactgaatgtactgccttctccatatttagtcttaacctcgacatctccaccaagagcttcaatctttgattttacaacatcaagaccaacacctcgtccggatacatctgtaactttatctgatgttgaaaaacttggcttaaacagaagatcaattgcttctttttctgtaagtgcatctgcctgctcctgagtaaggtttcctttttcaacagctttctgtttaaccttctctacatcaataccattaccatcatctcttacttctatgacaacattgttgccctcctgatatgcatcaagccatatagaaccaacctctggcttgcctctctcagctcttatctctgcgctttcaagtccatggtcagcagaatttcttaatagatgcataataggatcacctatctcatcaataactgttctgtcaagctctgtctcctcacctgacatataaagttccatcttctttccaagtttcttgttgagatctcttatcattcttggatacttggcaaatacactctcaataggcatcatcctaaccttcataactgactcatgaaggttagttgttactctttcaagatattcaatctgttcaccaaatttctgattaacagatgttgtaccatcttctgatacactggctgatacaagcccgttctttgcaataataagttcgctgacaagattcataagaacatcaagtttttcaatgtctacacgtactgtgtggctcactgttttgcctgccttattattgttagctgcaggagcctgcttctttgccgtcactggtgcagatggttttgtctctgactcatccttcttttcttcctgctttggtgtatcctgcttctcttctttatcatcttcatctgcaaaaggagttgttatagcctctcctgcagcatctttaatttccgaaacattcttgattattccaactattgattcataactttcttccgttacaacaacaatgctgaaatcaagctcgaatttctcatcttcaatatcctgtgcagatggctctgatttgataatatcacaatgaccttcaagattcttaaatacaagaaatgctctggctgccttaagaatacagttttcatcaacacttactttaatgatgaacacattcatcttcttctcaattgcttcgttaacagcattcttttcaaaatcagcaaataccatgttattatatctggcataagtacctgcaacatctgtgctttcttctttcttctcttctgcaggagcttcttccttattagcttcctcaggtaatacccccttatcttcattattaactataaatgagttaagtgccttaattattggctcattatcatcagttccttcatcagaagtctcctggatattattaacatactgctctaatgcatcaaggcactggaacaatacatctaccattcttgaatcaactttaatattaccattgcggacctctgaaaatacattttccatatcatgagtaagattctgcattctcttatagcccatcgttccagccatacccttgagggaatgtgcagctctgaatatttcgttaattgtatcactgttatcaggttccttttcaagaatcatgataccatcacttaaattctgcaaatgttcattagattcgtcgataaatatctctaaatactggcttacatccatcttaagatacccccacattcttcgttatagtttctgcaattttattcaatggaacaacctcatcaaccagtcctgtctgtgctatagccttaggcatgccatatacaacacagctatcttcatcctgagctataacatgaattttcttatggctggcagaaagagtttttattccttccgtaccatctgctcccattcctgtaaggacaacacatgtaatctcatcataattacactgtacaagtgacttatacataacattggcacatggtcttaagccatctataggaggctcgtcattaagctttatcacatactcagatgctttcttgacaaccttgatatgttttcctcctggtgcaatatatacccagcctttctgtataacatcaccatctgccccttccttaacattaatatcacttatttcgttaagtctggctgctaaggatgctgtaaaccctgccggcatatgctgtacaagtaccactccggcatccagattcttaggaagcattggtattacctgttgtaatgattttggtccacctgttgagcaggcaagtgcaacaaccttcttactgccacttttaatattggtaaatcttgaaggattaacctttggaggaattgtatcattaatctcattcctgcgtcttaaagcagatattgcatcaatagaagcttttttctccgatgaaattaatgatgtccttcctgatgtaagcctgctgccagaatatcctgatggcttcacatccgtagccgaccttgttctttccacagacgctttggaacttgttgcaacattaagcatatcatgtatacgctttttaaagtcattgcccttagtttcaaaataattctctggtttggtcacaaaatcaaacgctccatattcaagagcctgaatagtttcttttgcgccttcttttgctactgtacttacaacaataacagtctgctcaatatgattcttttgcagcttctgtaataattccagcccgttcatcttaggcatattaatatcaagaattattgcactgtacagattaggattagatacaatcaaatcaaatccctcaagtccgtcttttgcaatagctgcgacttcatactcattaccttcgtttattatatcagatataacccttctcatgagtgcagagtcatctatgacaagtattttttttgccatattacagccccctttctttcttgcgaattattctttgctgggcaaaaacgtatttaacaatatcctccgtatcttccttctgcatattcacaaactgaagtctgctgtcatatacgctgtcagaattctgattgcgcattgacattacaacctttgccatcagcttcatatatctgcttctgtcccctacctgtattggaaaacttacattaacaatcgaatccgcatcatattgtttctttgaaaaaagtctcagtccaccaccgcttatgtcaacaattattcctttgtcttccggcatgacaaaattatccggcaattttccggttacatcaaaattctttcgttcttcatctgtcagcggtataatatctgcatcaatagtgcatttcagcctgtagaattcccttctctggaactttacaagtgctgtttcaggtcttaattcaactgtaaatatatttccttcttttcctcttgattttacagtacagtcagatttataaatgtaattacctgtataaaaaaaagcttctatcatagttccaacttcaagcactatcatttttccctgtcttgaaggcatcgtacagataatagtctcatcattgatatccattatctggcttacaagcatttcttttgtttctccgctctcttttatacgcctgctctttttaaataattcaaccttcccacctacaacaagctgttcgaacattcccgcacctcatttcctcttaatcacatattctttgcaaatacagaccttagatatcctcttatgcctctcttatgaacaggaacatctgcgccttctgacatcagccgtgttgctatttcttcaaaatgccttgacgatgtggcatttggaaatatcatagagaccggtttctgcttcataattgcttttttaatattattatcctgtggaaccgcacctaaatactgcatattaatttcaaggaatttcataaccacaacattaagcttttcatacaggcttctaccctcagcttcagaatcaactctgttagctatcatcttaattgttgtttcatcttttttgaaattctcattcatgcttaatgccttaaggagcgcatatgaatccgttatcgatgttggttctggtgttgtcacaagtatcgtctccggacttgcgacaagaaactccatgacagcaggagatattcctgcaccggtatcaataattataacatctgccattccttcaagttctgagagtttattaacaagccttcttacctgctctttatcaagattgacaagctttgcaattccagaaccacctgatatgaatcttattccttcaggtccttctgttattatctcgtcaagctccttgcccgcaaacataaggtcactgagattatatttaggaataacaccaaacattacttcaatattagcaagcccgaaatcagcatccagtataataactttcttccccatccttgtaaactgcactgcaagattaatagaagtacttgacttgccaacaccgccttttccacttgttacggcaataacacgcgaattcgtaatgttttttaaattttgttttttaattatattgcgaagattctctgcctgatccatcatgatttacctcccaataataatttagcaagtctctgctcattaattacctcaatgtcattaggtacattctgtcctgaagttgtatacgaaagctgtccgcctgtataaagcttcatattaagcatattcccaaggctgcatgtttcatctaatttagtaaatataatagcccagtccttaatatgcttatatttatctgcaatatttacaagatccttatacttggttgtgacacttaatgtcagatatatttcaaaatcaaattcatcctttctgcgttcaaccgtctcaatgagcttatccagctcttccatctgttcttctgacttatgtgaccttcctgccgtgtcaacaagtataagttcataagttttaaattcatcaagacactcatccatttcatcaggagaatatgccacatttacagggcagtcaattatagacgcatatgtattaagctgttccactgcagctattctatatgtatcagaggttataaaagcaacctttgtgtatttttcaagtttaaaatgtgacgctatttttgcaatagttgtagtctttccaacgcctgttggtccaataaaaaatatcaccttcggtttgtctccaagagatattgtgcggggttctccaagctttagtataatcttctggtacacagcagacagaatgctgtcaatattagattctttcttaagcgaagcctcaatatcagcaattatttcatctgcatattttgaatcgacctcattatcaaccagctttttatatataagctgtaagaatttataattggcattctcacgctctttaactatcttctttcctgtatcctgtgcatgtatttcttcatgcatgacagttgctgctgccggtctctttgcactgctgcctcctggattcatctgattttcaagaagtgaatggagtgaatcaagcttcttctcaatattagcagcattagaattcatatcaatcttttcatctgcgacaagattaatctgcgatcctcccgtaatattcttcataggctgactgcttataaatccactattagcacctttattttccatggttggctttttattattaatgccattaataaattctttttcctcaagtgcagcagtaacctcaacaacatctttcttaaaaagtctgaatacacctctctgttttaatgtcttgacgttaagaaccactgcaccgcttcctaattcatctttagcttttaatattgcttctgtctctgtctccgcctgaaatttcttcactatcatttatgctgtcaccatccccactgattgtaattctacattagattccacctcattatatgaaatcacaattatatccttataataatccttagccagatttctgaaatacattcttacaataggcgatgtgataactattggattcttacccatatcctcaagcttcttgagttcattgcctaatgcttcaacaatcttcttgctccgttcagggtcaagcgacagatatgacccctgttctgtattcttaacagaattcataatctcctgctcaattgcagggtcaactgtaacaacatttgtcacttcgcctaccgtaaagtacttgcttgaaattgctctctttagtccctgtcttgcgtactctgtcaatatatccggatctcttgtaacagcagcatggtctgccagagtttctaatatagtaacaagatctcttattgatattccctcttcaagaagattctgtaaaaccttctgaatctcaccaatgcccataagcttaggtacaagttcatcaataagtgttgaattgttatctttaatattattaataagattctgtacatcctgtctggtaagaagctcagcaatgtgctgtcttataacctctgtaagatgtgttgcaataattgatggcggatcaacaaccgtatatcctagtgattctgctctttctctctggctctcagttatccatatagccgggagatggaaagatggttcaaatgtaggaataccggttatctcttcttcaacatatcctggattcatagccatataatggtcaaaaagtatctcaccttcactcacctgtatacccttaatcttaataacatactggtttggattgagctgtatattatcacgcagtctgataataggaacaacagcaccaagctcaagtgcaatctgtcttcttatcatgacaactctgtcaagaagatctcctccctgattaacatcagcaagcggaataattccatatccaaattcaagctcaatagggtcaacattaagcagtgaaacaacattttcaggcttacggatttcctgtgcctcgttctcttcctgctcagcgctctcttcaatcttagcttctcctgctttagttcctagcttccttccgtaaaaaataagagctgctcctaacggaacaaatatgtaccatggcaacggtgttaatattccaaggacagaaagtgcagcaccaaccataataagtaccctgtccatcgaaaaaagctgtccaactatctcatcaccaagttctccatcacttgatgctttagttacaagaatacctgttgcaagtgatataagcaatgatggtatctgtgaacacaatccgtcgccgattgtaagaatagtatacttagaaagagcatcattaattgataatcctccatatatcattcccatgactataccaccaacaaggttgattccggtaataataagaccggcagttgcatctcccttaacatacttggtagcaccatccatagaaccaaagaaactgttttcctgctgtagcttctttcttctctcagcagcctccttatcagtaatggctcctgtattaaggtctgagtcaatagccatctgcttaccagccattgcatcaagtgtaaatcttgcagttacctctgcaactcgctcagaacccttgttaataactataaactgaacgataataagaataatgaatataataataccaattaccagattaccgccgccaacaaacttaccaaatgtatcaacaaccttacctgcatcaccattctttaatataagcttagttgaagatacattaagggaaattctgaaaatagtcgtaaataacagcatcgtaggaaaagatgccatatccagaacttccttagcaaaaagtgaattaaaaagcaccaccattgctaccaggatattaattgcaagcagaatatcaagcagccatgaaggaattgaaataatgaagaataatactgctgcaagcagatatattccgataaacagatcgttcttcttaatcttcatcatttctctcctttcaatttagtcattattttacataatatcacataatctgacttttatctattatttgtgcgtaaaacagatgcaagaatttctgcaactgcatagtacaactctggaggtatttccatacctatatcaacattatgataaataattctcgcaagaggcttattttctactacagatatattgtactcttttgctttatcccttatctggaaagccagataatcagcacctttggctataactacaggtgcttttccagaatcaggttcatatttcagtgccaccgcaaaatgtgtcgggttcgtaattacaacatccgcctctggaagctgctgcatcattcttcttcttgagatttcctgcatccttctcttaatctgtcccttaacctgcggatcaccctctgcattcttgaattcatctttaatttcctgttttgtcatcatattatcagtcttaaacttatgtctctgatatataaggtcaacaaaaccaactataagaaacactgcacttatctggattccaagattaataattatattaccgaccacagaaagcgcagtatataaagtaacatcataaaaagtaagcagaatattcatattctttcttacacaattgtagaccataattccaataatactcatcatggcaacagccttaatcagttcaaataactgccttacagaaaaaatccttttaaatccattaagaggattaattttacttgccttcggtgcaagcggtttagctgtaaccatccatctttgctgaagcatatttccaagaattgctatgattacagcgacaataagcacagggataataatattaagaataattataattgcctgtcttacaataccagatgccatattaattgtcagtccctgtgaactttcattaataaccttccccataagagcatatatcgttgtaaatgcatctatcagtttagttcctatctttccaacatacactttaagcataataaacagtgacataagtgaaactgccgttatcagttccttacttttggcaacctgaccttcttttcggatatcatccagcttcttacttgtagccggttctgtcttttctcctcctggtccgtctttagcaaacaactggaggttcatgtaaagataagttcttcgcactagctcattccccttactaacatagcaaataatctttctatctcatcaagtataaaatcagacactgatggaagcattgaaattgtaaacaaaattacaaatatacctacaaatatctttagctgcataccaacaacaaacatattcatctgaggtgataccttggcaagaatcgcaagcacacagtttagcataagaatcgctgaaaataccggaagcgcaattctgaatcctataacaaaaaaatctgacataaaacttattatggcagtatatattcctgcaccaaatttcaccccaccaattggaataactttatatgtctcaataattgcagcgacaagatactgatgcatacctgaaattataagcagaagcatcatcatataataatataaatttcccatgataccaacctgcattcttgttgtagggtcataaagctgtgccattgatataccgatatccatatcaataatcttacctgcaaacataataatctgcacgcaaaaagacgacactgccccaagaagaattccaacaatcatctcctcaacaacaattattgcataatcaatcatgccattatactcaactgtcatatcaggaaaaagcgaatataccagaactgtaaggcacagtgcaaatccagcctttacctttcttggtacatttgccatattaaaaaaaggcgcagcaaatacaaaagatgccagccttattaatatcaaaacaaataattcaaattgctccaatgcaaatgtaaaattcataacacactatcctgccatcatatatactgaccaaagcttccccaaagcatctgcataaacgaaactatctcattaagaagccagtttcccataatcataagtgcaatcataattgcaagaagttttggaacaaatgtaagtgtctgttcctgaatagatgtaagtgtctgaaaaagacttataataagtccgacaatcattgaaacaagtaaaagtggcacagaagtcttcactataacccatatagtctgtcttgctactgttacaacctgtccagcatccatattctttacctcctgccttacttaaatgttgctacaagatttccaattatcagattccatccatctgccattacaaaaagtaaaatcttaaatggagcagatatggtggttggtggaagcatcatcatacccatcgacataagagttgacgatacaaccatatcaataataataaaaggtatgtatattaagaatcctataataaatgcaattcttaattcacttataataaacgatggtacaagcactgtcatagaaatatcatcttccgatgtaacggagccttcctcatatcctgcaatcttaaaaaatgtatcaagatcctttgtagaagtctgtttcaacataaagcttttcaatggctttactcctgtttcatacgcttcctcgaccgatatctcattattggataatggttttagtgcactgtcataaacttccgtaaaaacaggcgacataacaaaaaaagtcaaaaataaagacaaacctatgataacctgattaggtggtactgtctgtgttccaagcgcagccctcgtaaaatgcaacacaattacaattcttgtaaatgatgtcagcataatcagaatagaaggtgccagtgaaattactgtaagtacaagaagcatctgcaaaacactagccatatcattaccatcactcgtagaaatacctatattaataagattatttcctgatgctgttgtttcctcagcagccattaccttatatgtaataaatgaaatggctgcaaaaaaagctcctgccccaaccgatattcctgctaatgcctttctatgctttctaatccactgtaacataactctctcgttcctgcctaattaattatctggtttgtctttcttaaacttttcaagtatagctttaaatccatcagtattgattgtctttgactctgacgaataagtcagttcctgctcgttaatctcactcaaaaaagtgatagtatctttgcagactgctactgcaaaacatttactgccaatcttaataatctgaatatacttagtattagacactctcattgtttcaagtatctggatattgcgtccagccattttggttttctgcatattaccagcccatcttgtagcaaaatatgtaagtgccaaaacaaatataaaaacaacgagaagcgtaagcaactgtgcaaacgcttcccatctactattcaacccagctaatgcaaccattattatccaacaactttctgaacagcttcaattactctgtctgcctggaatggtttaacaataaagtccttagctcctgactgtatagattcaataaccatagcctgctgtcccattgcagaacacataataacagatgctgaaggatctgcagccttaattctcttaagagcttcaattccatccatctcaggcattgttatatccataagcacaagatctggctttaactcagcatacttttctactgccttctgtccattctctgcctcacctgctatattgtatccattctttgtgagaatatccttaatcatcattctcatgaatgcagcatcatcacaaatcaaaatattctttgccataaactttctcctattcaaaaacaaattattcacaaaattcattcgaatgtattatacaacaaatgctatcaatttcctactctttttttgattttttagaaaatcataaaaattacttgataatctctgttatacgtacaccaaaactttcttcaataacaacaacttcaccctttgcaacatatttgccattaacaagaacatcaacagattcgcctgcaattttattaagttctacaattgttccaggagcaaattcaagtatatcttttatagattttgttgttctgccaagttctactgttacttcaagtggaacatccttaataagttcaatattttccttctgtgtcaaaggattgacatctgttgaaaatggctgaaatgctgctggagatacattaacatcctgtgctggtgcataccctgtcattggcataccctgcataggcataccttgcatcggcattccataaccataaggcattcccatattctgcatcggcattccctgttgtggtgctgtctgtgctgtagtattctgcaccggtacatcctgctgtggcattgtctgtgtcatattctgtgccgaagcctgctgcacctgctcttcctgatgattagctgtatcttcctgacttacctgtggctgttcaggttctgctgacggcataaacatgttaagaagttcctgtgcaaattccttaggatataactgcataatctcactatctataagttcgccaatctgcatcttaaaagccaccattacaaaatggtttttaaggaatcctggcaggttatcatctaattcattgtatgtctccactaagttagctattggtggactgatatcaatttttctattaaacattgatgataaagatgtagctgctgaacccatcatctgattcatagcctctccgattgcactaagatgaagttctgtcaatggttcgtctggatcagcattacctggtcctcccatcataaggtctgtaattatcttaacatcattctctcttaatattaaaacattattgcctgcaagaccttctttgtaagaaatctgcaacataacacatggtctgtcatatttacttgataaatcatcccatgtagcaacttctacttttggtgttgtaatattaactttctgtgaaagaagagaactaagtgttgtagcagctgttcccatgctaatattagatatctcaccgacagcatctttttctgactcagtaagtgtaaagccgccatctgtattatcattagcattatcctctggtatagttgttgttgctgttgatgaatcagatgtgtcatctcctcctgtattcatgccactcagaagtgcattaatctcgtcctgggataacattccatccattattcttcactctcctctctaattacattagtaactcttactgcgtatttattctcaaaataaccaggtaaagctgtaaacttcttaatattacctacatatacctctaattcctggtcaacctttttatcaatttttattacgtctccaacctgcagattaacaaaatccgaaacactaatcttagatgtaccaagcactgcctttattggtatcattgctttatcaataactgtttcaatagcatcctcatatgtattggaatctttttcctgcatattagaaaaccaatacttggtattaagcttatccataaccggttcaagagttgcatatggaagacatatattcataagtccctccacatcaccaatcttaatattaatagttacaattgcgattgtttcactcggtgatataatctgtgcaaactgtgaattagtctctattctttcaagtcttggattaacctttacaacattttcccatggttcctgcaactgattaacacacactgtaaagatacgttccagaatcgtaagctcaatttctgaaaaatctctctctttatccaaagcattacctgcacctccaagaagtctgtcaacaattgcaaaccccagattggatgccatctccataattatgttaccacttaatggttgcattccaacaacacctaaaagaaccggattagaaagggcattagaaaattctgaataaataactacttctgaattaacaacctcaacattgactgtctttctaagatatgccggaagattggtactcagcagtcttccaaaatgctcaaatattatctccagtgttcttagatgttctttagaaaacttagaaggtcttgcaaagtcataattcttgacttgcttttcttctgtgttcttcatctcatctacatctaattctccactgcttaaagcttttaagaggttatctatttcactctgtgaaagtacctctcccatcttcctcacctccttatcatattctttaatgtttactggacaacaatattaatcagtacactttgtatcgtctcagtcttgaataattcctggaattcctttaaaaggtctgtttccatggttgatttattagcacttattgtgctgtaagtatacttattagcttcattggttatcttattaacaaggaccttcatcccattatcaactgaagtcgatacagtactataatccttagcttttgaattaagtccgacagatactgaaagtacggcatatcttgtttttccattatcaacatatgaaacaattatatccgtgctgtcattgttcttaatatcaatataacttacattttcaattcctgaacctgtagatgaattattattagaaactccacctgcaacatccaggtcaataatctgtgccactttattaataagagaatttgtcttcttatttgttgatacaagtgaaaatgtaagaatcactgtaagtaccagattcacaagtacaagtgccaaaataatcacattaagcatactctttttcatgagtaatcctccttagctgttaattgaattatacaccttaatctcaactcttctgttctgggctcttccttctggagtatcattagttgcaataggtactgcatctcctcttccggatgagctcattgtctgatctgaaaagcctttctcagacacaaagaaatcaaacacactgtatgccctgtaaagagaaagcatcatattattaggaaacagtgatgtattgataggaacactatcagtgtgaccttctatggtaataacattatcatcatattcaataagtgcatcagcaaccttgtcaagaagactgcgtgcctctgatgtaagctccgactttcccgaattaaacagaattccaccacttacattaagcattacatatttactataagcagtaacatcaacataatctgcaactccactggctgtaagtttatcaacaatctcctcagccatattttcagactgctcaagaccttctttttcaatctcttcataagcattctgtacatcctgtgacatatcgccatcattgttaaggcccatattgttatagtaattgctcaattcattcagctgactcgccccactgcttacaagaattccttcctttgacagtgcagaaccgccttgaggaagtacactaaagcttgatgaaagtgaagctgcaatctcctcaaacttctgagaatcaatattagacatagcaaacatcaaaacgaaaaagcacagcagaagattcataagatctgaaaacgtatctttccaaagtgccgctggtggtgcattctctgtacgctgtttagccatcagccttcacctcctccttgttcagataatgctgttctggcagatggtgaaaggaaagacttaagcttttcttcaataactcttgggttctctcctgcctgaatagaaagaagaccttcaataataatctctctaagctgatattcatcattattctgaagcttgagcttattagatataggaacacatatccagttagcaatcaaagaaccataaagtgtagtaagaagtgctacagccatattaggtccgatagatgctgtatcagataagttctttaacatattaacaagtccgagaagcgtaccaatcattccccatgcaggagcaagagctgcccaattatcaaaaaagccaattgtactcttatgtcttgtatcaagattaaccagttctgtttcaagaatgcctctcacaagttccggctcagtaccatcaacaatgagaagaatacccttcttcataaactcatcatcaagtccctgtgccacttcttcaagtgcaagaaggccttcttttctggctgtgttagaaagctcaataatcttagaaataacctgtccattatcaagcttgggatctttcatagcaatgccaaatcccttaagatgtcctaagaatgtcttaaatgtataagatgtgagcataccagccattgaaccaccaatagtaacggcgattgacggtatgtcaacaaatgtgtccataattccctttagtgtaggattagtcgtacttgttataattccgataacgaccatgacaaacccaataataattcccaacagtgtagctaaatccataattgccccttccaagtctctagtattctatatatattatcacttagtatctgtaccagacgcatacagattaccaattatatttctcttataagtaataaccttgctatatacctcttctacgctttccttgacaacgtatttatgtcctgttgtcagggttataacagtatcaggtgtttcctccataacttcaatcagttctgcgttaagcacaaagctttttccattaaaccgtgttacatcaatcataattcctcccgataccacataaggtatagtaccccgcttaaaatcaactatatatattaaaacacttatggcgaattattgcaaggaatacttgtaataattcgccataaatatcttttcatgtcaattatctcttaagattaataagttcttcaagtaatgtatcggatacagtaataattctcgaattagcctgatatcctctctgagttgtaatcagatttgtaaattctgaagagagatccacattagacatctcaagtactcctgatgaaatacttccatcaccttctgtaacatcctgaccaattccatcaaaagttccagaattaagtgttgctgaataaagattatcgccttctttctgaagaccttcagggttagagaaagaagcaactgctatctgtccaatattcttagtaacaccattgctatagcttgccacaatatatcctgatgaatcaacaccaaccgatgtcatcttacctactgccttgccttttccaagtccattaatgccaagctctgaattaagattagtcttttctgaaaacattgtaattccagatgcatccatcgtaagtacaggacttgtctcgctttcaccgataactctcaaatcaacgccttcaatagcatctgatgcagtcccgttattagaaaatgtaagcttaatatctgaatttgatgcatcggcaagacctgtaagtgtattaaatgataatggtgctgacgcagtaaatgtaaggtctgtcggcttaccattctttgaaactgaaacaggctcaattgtatactgcgtattatctccctgaacgcctgcatacacaagattaactgttgcctgataagaattaccaaggctgtcataaaaattaatagttgtagtacttgtatccttagaacctgcattaaggttacctgttaccgtaacagatgaagttctttctggtgaagtatatgcaacatccggactgttaacatacagctttgatacaaggtctctttttgcattaccagattcatcaacctgccagcccattacattagcgccacctgttgttacaagagcacctgactcatcaaccttaaaattaccggctcttgtgaagaatgtattacccgcactgttaactataaagaaagaacttccaccaatctttaagtcaaatgcattatcagttctctcagaaccaccttctgaagaaattgctgtagagatagaaccaacagatgatccaagaccaatctgcatagcattagttcctccctttcctgtttctgcattaggtccggacgcaatctgagttgtctgataaaaaacttctgaaaaagtcatagactgtgacttatatgccacagtattaacattggcaatattattaccaataacgtccattcttgtctgatgtgccttaagacctgacacagcagagtacattgatctcatcataatatttgttcctccataaatatgtaaagacatatatctgatgcattcatcaataaagcatcgtcccttctggcattcagggacattcgcctccttgcggtccagctaaataattactgctccatcaatattagtatagatattgtcttcattgttattctgatccatcgccgtaatcactgttctgtttcttgtattaactataaaagacagatcatcaactataacgagcgattcattgattcctttcaaaattgctttttcggttccttcctcaagccttgtcatctgttcgtctgataaccggatatctctctgttcaagcctttcaccagcatgtttagagaacttcaacccttttgacgatttaatatcgctgtcggaaataacctcttcaatcgaacgcttctgattatatatatcagcaaatgttttgccattatacattttatcaacattatcagaattcttctttcctataatgtccgtcatcttttcgatagaagcaatattattacctatcatattattcatcataacggtcactccccaggttttgtatcctctgtcttagtatctgttgtagaaccatttcctttccatttgtcaaaatagtccttatccattacagtatcaagatctgcaatatcataaagctttccaccaattccaagataaacagttccatttattgtttcccaataatcaacagttccgcctatataaccattgctgttctgtgttgtagtcattataacctgcttacccacaaggttagatgccatatcctgtaatgtattatcattcatttctttagtagcttcaacctgtgtaaatgtagcaagctgtgccatataatccgaattatctgtaggttctagcggatcctggttctgcatctcagctaccataagctgtaaaaactgttcaacatcaagcgttgtcttattagtagtactcttattctttcctgttgaacttaagttgctgttaacatcgtcctttgtacttaatgaaccatcattcttcacataagaccatgcacctatcgtactagccatatattatctcctttctcatcttattctatgctgaatattcaacactgctgtcgccattaacaatagcatcttttgccctgatttcttcatcagtcatatcagattcttccagttcttcaagactgctaagatcaagctttctatgagtcttcttttcctgaccagcctgttctgaattattaccttcgagattctgctgtgattcaaaaccatgactctgtacagtaatctctacagattcaaccttcacaccctgattgttaaaatgttctttcaaagctgtcatctgattttcaagagcagcttttacctgttcattctgtgctgtaagctgtgctgtaattactccctgtcttgctgtgacagctatatgtacttttccaagattctcaggattaagcataatttcaatgcttgaaagctgctgtcctgttgtaaccttaatctgttctacaacctgtcttacaatatcagcttcattaacattagaaacttcatcaataatctcgctgaaagcattctggatgttctgtgccatattcccggtaaagttttcatttcccacagatgctttatcagacatatgagtctgctgcttatcatccgcattattgtcattatcagcctgcactttagtcttctgtgcaattacattgcttaactcatactgtgatgctgcttccggccgttcttctggctgtgcatcttctttcaccacagactgtttaacatactgtttaacatcatccttcgcagaaacaagcatttctttaattgaatcaatgtccatattatacacatcttccagattatctgtcacagactttgcatattccagtatatcattgagcatagatactgaatctgcatctgtcaaaaactcaagtgaatcagtgtttccgctaagagcaactacaagatccgtaagcttctgcatgtcaagcaaatcctctgctataattccaagcttctccatagcactctctatatcttcatcagatacattcattgtttccttaatcttttctttaatgtccgacactgcattctgcacatcctgagtcattttgttatcgttttctttaaccgcattatctgtttttacagttgaattagtggtaacaatatctgcattcttgttagacttattagcacccatgcttacaagtgaatctgatggagctgctgaatatgtattagtctgctttgatgaattcccagtcacatcgtttcttacagaactattcattatccttgcaaaatcaacattcccggaattatcctgaccagactggcttccaacacttcctgccaccttagtaaccggctgaaccattcctgtaacagctgaacttaccatattatcctcctcctttcttcatattagaatcaggatagacctaatccatattatatatcggtagtctgtgctacagacttaacctttagcaggatacataataactgtaagttttgcagcatatacaggatccatctctgcaagaattgctgctctctgtttagatgtcatacaaagaagtatatcagaaacaagatctgtatctccagtcatctcttcaagaatagctgccgcatttttcgcatccatcttagaatatgtttctgcccagtccttaacctgctgtgagtactgtagatcctttacaacctgttcgtaaagctttgctgcattttctgaatcaatactttcataccacgatttgtattcacttatatctggagcattatctgtatatacaacatctgtatcgaacttatctttaagttcctgataatgctgtgcattctcttcaaacacttttagtctggcaatctcagcctgaagctcagcaattgtctgggctgatgcattcccattattattgttttcatcaagctgtgcttcaagttctttaattctgtcaactgcttcagaaaggctcttgtacttcccccctgtttcttcctgaatctcttcatctgtagctgctggaagaatcttattcactaccggaacatttttaagatatggccgtaaactacttccaataccgccgacattcatcttaataagaagtgcaaatataacaagccatattacaataataagcattgcaaccagtatgcttaccagctttccactctttcctgattcatcatcaagttcatcaatattaacatcttttttcttagccatatcaatctttctcccaaaaacaattactcatctttgttattatatttaaagctcaccgtttcatctatctctttcatttcctgagcattaatatcaagtttaaactgttcaaatgctttctctttcagtttttcatgaattttcctgtcctgcaccgcctcagtcagtttcttcattgcattatcaacattgcgctgtgcaatccttattctgactgcctgctgtgtcatctggttcttgataatatcaattgcctcattacatctgcgcatttccataatatcaagtctttctgatgcagagcttctcgcaagattttcatatgaatcaagcctttttccgagtcttttcatagtttcctcttcaatgaaaagcctgttattcatctcagcatattcagttttagcctgtgtttccaggcgttctttaatatcaagaacattctgcatgctgtataaaaattttgccattcatgcctccactatttctttaactgaagtgagccattttcaaatgcttcataatccgcaaatatatctgacagttgtgtgacttcatcttcaaaatcaaacttttcatccgtctgctgcataaggaacttattaactgcatcaatcttatatatagcataatcaatattacggttagagccactcttatacgcaccaatattaataagatcttctgcttcattataagtcgccattacatttttcattctgccagccatctgtttatgcttcttgtctacaatctgactcatacatcttgatatgctctgtaaaacatcaattgcaggataatgatttttctgtcctaactttcttgacaacacaatatgtccatcaagaatacttcgtgcagtatctgttataggttcattaaaatcatcaccatcaaccaaaacagtatacagccctgtaatagaacctttgtctgacatccccgccctctcaagaagctttggcatttcactgtatacactcggtggatagcctcttgtcactggcggttcacctgacgcaagtccaatctcccgctgtgccatagaaaaacgtgtaagtgaatccatcataagaagcacatccttgccctgatccctgaaatattctgctattgctgttgcagtcttcgcagccttatttcgtatgagagcaggcttatccgatgttgcaacaacaaggacacttcgtgccataccttccgggcctaaatcccgctcaacgaattctcttacttccctgcctcgctctcctataagagcaataacattaatatcggctttagtatttcttgcaaacataccaagaagtgtactttttcctacgccacttccggcaaatatgcctattcgctgtcccttaccaacagtaagtaatccatctacagcctttacgccaagaggaagcaccttgcttattatctccctgtccataggatctggcggtgctgcctcaaccggatattcatctgtatattctaattcagaaccatccgtaggattcccaagtccatcaagtgtatgtcctagtatgccatcaccaacctttaccgacaaaggtcgttccatattctcaacaacacttcccggacctatcccatccacaacatcatatggcataagaagcacatttgaatcattaaatccaactacctctgcatataattcctgactgttatccgcagaataaattctgcacaaatcattaagcttagcatccggtcctaccgattcaatagtaagaccaacaatcttagtcacttttccaagtttcttatagaaggatttttctgtcagcgataaatatttatttttattgattgatgacatatcatcctccttaacaatacaattagttctgatcatacttgtaacatcagcctgtgcagcttaatagtttaatattattaataagcttattaagttcaatatcaaggctgcagttaaatatacctgtattcgtctctatcatgcactgattccgttcaagcgtaacatcttccacaatatctatattgacctctcttgacattgcacaatatatcttgccctgattattaataagaaaactataatcatcaggcgatacttttataacaaaatccctgcttgtatctgcgttatgcatgacatcgttaatgagatgcaggataatatcatgattatcctccgttacaacacctgtgacttttctgaatacatctgtaataacttccacaagttcaggttctatagagtcctttagctcgttatattcattttcaagttctgattttttcttattgtactccgtctcaagctcctgctgcttcttttcaatttccgcatctgccttagaacagccttcataatagccattctgtttagcttcttcaaatgcagtatcagcatttctatttgcttctgaaacaatctgttctgcctgaagtctggcatcttctataattcttgctgcttcagcattagcattttccaatgcagccgcagactggtcagaatcagctccgctatcctgtattagtgcttccgaactatcatctgatataagttcttccacaacgtccgcattgagtccgttaacaaatccatctgcatcaactgctgcatgtttagactccattattgcctctagttttttcttaatcagatcattataatcaattactctttcgtccttattcaccgtgtatacacgttttaacagattagacaattatctcgtcacctccaccacgtgatattacaatctctgctgaatcttcaagctttctgataatattaacaatcttctgctgagcatcttcaacatctttcatacgtacaggtcccatatattccatatcttccttaatcatagaagcaagacgtgttgaaaggttattaagaataacattctgaacttcctctgtagcccccttaagtgcaagagcaagatcatgattatcaacatccctgagtactctctgaatagctctgttatcaagagaaagaatatcttcaaatacgaacatcttcttacggatttcatcagcaagctctggctcttcaacctcaagagtttccataatatgcttctctgttcctctgtcaacagaattaagaatctcaacaatggcatcaacaccaccaacaattgtgtaatcctgattaacaagtgaggcaagcttcctttcaagtaccttctcaacctgcttgataacatcaggcgatgttctgtccatcatggcaattctcttggctacatccgcctgtttttcaggtggcagtgctgaaacaacactcgaagcctgtgctgcaggaagatatgaaagaatcagggctatagtctgaggatgctcatcctgtataaagttaagaagctgtgtagaatctgtttttctgataaactcaaatggacgaacctgcagactcgctgtaagctttccaataacatctcttgccttatcttctccaagtgctttttcaagaagttctttggcatatgtgataccaccctcagcaatatactgctgtgcaagacatacctcatagaactcgttaagcacctgttcttttgtctgaggtgagacactgcttgtgtttgcaatctcaagtgtcagctgttctatttcttcttctttcaaatgtttaaaaatctgtgctgatttctctggtccaagtgcaataagcaatatagcagccttttctacaccatccatttctctttcagcattagctgatgtctttggcatatgtttccatctccaatcatatgtaatcaattgacctttcaggtcctatccatcataatcaccagtcatcattaagccagtttctaagcagtaatgcaactgcttcaggattctcatcaacaaacttctcaatagcttttctcgtctccgacttctcctgaagatcaatatcatcaacagaaggctggttttctttagttgaagcaagcatttcttctacagaaagttccggttccttctcttctactgtaagtggtcttgcgcttctcaaaactataaacacaagaatgccaagtatagcaacagccagtccaatctgaatccagaatgaagcacggcttaatacactagtcttcggtgcatcatagaaataaggtacattatatgctaaaacagtaatgttattagttgagattcctgtagcacttgaaaacatattcatccagtcattatcaacattaacctgaacaggatttgcgttctgagccttgaattcatcccatgtcatattatcaagatatccaagattcttacaatcttcttcattataaataacattctttataagcgttacagccattgtagaagtaccatatactatctttccaggatcactattagttgtagtaacaagctggttaggaagatactgatactgttttacagtatatgttgatgaacttgatgtaccatctgtaagatcatatgtagttcctgtttcaccattactcgtagttcctggtgttccacctgcaccatttgttccattcgattcaagttcataagaagtatcatacagaccttcttctctgccttcctgtgctgtatactcagtagcaatcttattcacagtatcccagtcaagatcaagattaatagcaactgttgcatcattaaacagtgatgttgaaagtgctgtgttcttaacacttgctgctaccgttgattcaatctgtgacttatactttaacttgcttgaataagcaatattagaaactgaacccgaattatcagctccattaaacaacgtctttcctgatgtatcaataattgtaataccattagtattgctgcttcctactgctgttgcaagaagaaccgctatactttccgctgtgtcttctccaactgtcttattagtatcaatcgtaacggctacagttgtatctttctttgtagaatagaatgaattcgtatcatctgacaaatgtactgtaacagatgcagatttgattccatctaaagaagtaatatcattttcaaacttagtttcaagatatttggcatacttcttattcttatcagactctgttgttgtaagactgctattaagagcatcatctaatgaatatcccgaaggtttaatatcattagaagcaataagcatcttagcattagtaagatcctgttcctttaccttaactgccatattatcaatctgatatgtatacccattatctgtaagcagtgaagtaactgtattcatctcattataatcttcacatcttgtaagttcctgatatgttggtcttgataacacaaccgcaataacaacaaccgctgcaataaatacagctacagcactcacaattattatcttctgattcctggaccagcttttccatatttcaagaaatctggctggaatctgttttaatttatccatataaaacccctaattacattgacatattcataatagagttataggcctccaatgccttatcccttattgctactgtatactgcagagcaatattagcctcctgctgataaactccaagctcatgagtattagtcatattgccaagagcataatctatctctgcctgctgtgctttctgcacatatgagttggtactgttcaacagccctgccactgagtcgtatatagcatcaaatgttgtatctgaatctttgcttttagatgtactaagtgatgcattctctttcattgccgatgtaaccttattgacataatcaccgccaaggcttcctattgcactagtaagatccatgttaaatctcctctttttgttcaaatatagtattaatcatatgaattaaaccagttatccacatatgttatgtagcagaacctattgaaagtcccttgcttgccatagatttactggcattaaatgctgatatattagcttcatatgaacgtgatgcatctataagatctgtcatctcctgaaccacattcacattaggatatgtaacatatccattctcatcagcatccggatgtgaaggatcatataccctttccatatctgttgatgtatcctcatatacagatgtcaccttaacgccgcttccaacaacaccaccattggcaagtcttaatgcatctgaaaatgttgaatatgctcctgtaccatatgaaccatacgcagactttccaagtactgtaccagtcattgtcttttcggtaaacacaaccgcttttcttacatagggagttccatcactcgttcttgttgtgtctgcattagctatattctctgatataacatccgttcttaactgctgggctgtcattccggatgcgctaatattaaacgccgtaaacatagacatagtcctgttctccttccatatatcaatcacattatatattatttaagcactgccttaaatcttgaaaactcattattcatactgtcaataagagcattatagttaatctgttctgaagcaagttcaacattctctgttgaaagatctacattattgccatcagttctatacgacaatgtgctgttatcagtgtaagtccttatagccagatcattataattaacattattaactctctgtgtaagagatgctgaattctttcctgaacgctggagtgcattggcaagatacgaactaaattcaacatcctgccttttataattaggtgtatcaacattagctatattgttagtaagaacttcctctcttgtccagctcgcatctgccgctgactttaacaaattaacatatccaaaagcgcctgtactcatatttatttcctttcttattcaataagcacaaaatatgcctactacgaaaacataaaaacactacatacattataaattataatataaaaaaaacaagatttttttcatattttgccacatttcattggattatcatgtatcaatatgtatacttatacaaaaagatgaatccaatcagacattgaatccatcccatcatctcaagctcaatcctttaagccctatcaattatacaatgtatactctcaatcttcaagttttttcaattcatcatatacaacttcattaagaacttttatctttgttcctttcattccagaagattttgttgatataacacccgcactgtcaaactttttaagtgcattaacaattacagatcttgtaattcctgtatcatccgctattcggcttgcaaccagaatgccatccattccatccatatgtgcaaataccgctttgacggcctgtagttctgatgccgataatgtctttattgctgacttaacaatctttttctttctctcatcttctgcattctcattattaacagaactcatcatctctaatcctacaactgttgcaccatactcacatagaataatatcatctatatcataatcagcaacacatttatagataaataatgttccaagcctttcaccagctatgtcaacaggagctattaaagccttaaacttacgttcacttccacctgaaaagcccaatgtaagcagattaacattttctttagttgataacactcccaacaatctttcattaagcatattatcaacaaatccgcctgtatcagttgttataagctcacctattttgtcaattccgctgtatgaagctgctcctagtatcttacccttctggcttataaccagaatgttcgactctaatattccactaagcacctcacagatatcattaaattccactctgtgagaatgattattgtgaagcagcttattaattttcctcgttttgtcgagaagctgaacactcattgtaaatcccccatccttcttttaaaaagcaattcacatatatcagctactgctctttatcattctttgattctacatatccgcaggtttcatcagcacatacaagtttactgcccttctcaatcatgtatccgccacacttaggacatttcttatctgaaggcttctgccatgacacaaaatcgcactctggatatccttcacagccataaaacattctgcccttcttagtcttctttaatataacatcttttccacattttggacatgcaacacctattttttcaagataaggcttggtattatgacactcgggaaatcccggacaacctaagaacttaccatgaggaccatacttaataaccatatttctgccgcatttgtcacatataacatcagtaacctcatcctctatcttaacatgttcaagttctttttctgcctcatcaatcgcaactttaagatccggatagaagtttcttataatttccttccattccacggttccctcagcaacaccatcaagaagagactccatattagctgtaaacttaacatcaacaatagtaggaaaagctgtcatcataatattattaacagcattgccaagctctgatatataaagatttttattttctttaattacataatgtcttgcaattattgttgatattgtaggagcataagtacttggacgtcctattccctgttcttcgagtgcttttacaagtgatgcctctgtaaaatgtgcaggtggctgtgtaaaatgctgtgtaccattcacatcatcaagtgtaaggactgaattctcgtcaagtcctttagcaagtgcattagtttcttcattatcatcatcagtcttgtatacagacataaatccatcaaaaacaatctttgatgctgatactgtaaatatatattcaccagctcctattcttacagaagttgtctcatactgtgcaggtgccatctgactcgcaacaaatctcttccatataagctgataaagcctgaactggtctctctgcaatgattccttaactaatgccggtgacaaagaaagatcagttggtctgattgcttcatgtgcatcctgaatcttcttgtcatccttcttggcattagaactttgtggaagatacttttccccataattctcactgatataatcttttgaagcgacttttgcctcatctgcaactcttgtagaatctgttcttaaatatgttataagacctactgttcctctgcccttaatatcaacaccttcataaagctgctgtgctatgttcatagttctctttgtagacatattaagtgtcttggcagcttcctgctggagtgtacttgtagtaaacggaagtggagatttcttaatcttctcacttttcttaacactttctatactgaaaccagagtttttgacttcatcaagaatcttctgcatctgtgctgcattcttaatatcaatttttccgtttctgtccccataaaactttgcaacaagtggtttcttttctccctttatattaagagaagcctccatagtccagtattcttctggaataaatgcatcaatctcattctctctgtcacatatcattcttaatgcaactgactgtactcttccggcgctaagtcctctcttaatcttagcccataaaagtggactgattccatacccaaccactctgtcaagaactcttcttgcctgctgtgcatctacaagattcatatcaatctttcttgcttccttaagcgatgccttaacagcattcttggtaatctcattaaatgttattctgtatatatccttgtcttctaacttaagtgccgctgccagatgccatgaaatagcctctccctcgcggtcgggatcggttgcaagatatactttatctgctttcttcgcttcttttcttaaagcagcaagaatatctcctttccctctgattgttatatacttaggttcataatcatgttcaacatctacacccatctggcttttaggaagatctcttacatgtccctgtgatgccattaccttgtagtttgccccaaggaatttactgatagtctttaccttggcaggtgactccactataaccaaatacttatgcattaatagccctccatatcaaatatgcttccttatataataattcttagaaacctcttctataagtccatctaactctaattcaagcagaatcccctccgcctctacaagattcaatccagaattattaactatcatctccagacttactggaaacaaattgatttgactatacaccatattcttagggcttgcaagtcctgattttttaaatttttcttcaaatataccattattattcaaactattcatacaattgtcatcttttttgctacaattaatatatctgttaatagattccgttgcacatatatccttaggtgatgtaatcagctgtgctccttctttcaaaagtttaaggcacccctctgacagagtatccccaattctacccggaacgacataaacatcacggttctgatcaagtgcctgatctgccgttatgagtgagccgctcttttgctttgcctccaccacaataagagcatctgacattgcactaataattctgtttctcataggaaacagacctgctttaggcggtgtccccggtgaatattctgaaataatcccaccattgctctcaagttgtgtgtataattcgatattagttctgggataacatatatcaaccccacatccaagaacagccatactataaccgccttttctaacagcacctttctgtgccgccgcatctatcccaagtgccattccacttataacctgaattcccatgtctgcaaaatcttctgcaaatcttcctgctactgacctcccatattctgtacagttccttgccccgacaattgctactgacggaacgtccgactgtggcagacttcctttataataaattatataaggataatcgtatatattcatcaatctttcaggataattatatttacccggatatgtgaatttaatattcttcttatccagttcagaatattccctatatatatactcactttttctagattcctttatagaatatatatcatcaggttttattcccatgacaccttcaaacatcttatctgatgctttatatatatcctctggtgtatcgaataccttaaataaatatctcagcttaatgttagctattcctgtaatattattaatccagaaccaataataatcatctttcaagataaacctcctgcctagtgtattgcttctttaatgtattgtcacctctggtattccacgataatagaacgcctcgcttatgttagctgttgttatattaacattaccatctatatctgcgatggttcttgcagtcttcaatatctttgaatatcctcttgcagtcagacgcttctttgcaaatatcctttttattaatttttcttcctcttctccaagtctgcaaaatctcttcatatctcctgtactcatctgtgaattatactttatattcatcccattaaaccgcttaagctgggcaagtcttgcacgcattacagcttgtttcatgctttctgaatctggcacattaccattatcactgctgcaccttatctgttcgtatcctatttcatctgtcttgatacacatatcaaatctatcccatagtggcatacttattttcccaatatatcttttaatatcctgttctgagcaattgcatctgctcctatccggataataaccgcatttgcacgggttcatcgctccaacaagcataaaatctgccggatatgtatatgtcctgcccattctgacaattgttatatccttatcttcaagaggctgccttaagccttctaatatttctggcttaaactccgtcatctcatcaagaaataatacacctttacccgcaagagttatctctcctggtcttggaaacatgcctccaccaaagaatgaactcttagttacattgtgatatggtgccctgaatggtctgtcttcaatcagcccgccatactctcctaattgtcctgcaacactatatatattggtaacagctaatttttcatcaaatgtcatatcaggcatgatagacggaatacgttttgccatcatagtttttccgcttcccggcggcccgatatacatgatattatgcatcccggcaacagcaatcatagtcgccctctttgcagcctcctgtccacatatatctgcataattaatttcttgtttatctgttgtacggcattgttctggattatcctgtctctggttctcaattataccattattgatatattgcaccgccattttcagactgttagtcggaatgatattcactttctccacaattctgccttcattataattagacactggtataagtgccttacttattccggatttctttgcttcacatacacatggcaataccccgcttacaccattaatgcttccatcaaggctcaactcaccaagtataatcatattatcaacattaacttcatctatgtaaccatttgctgataatatagccagtgctattggcaaatcaaaacctgtgccacattttctgatatctgcaggagatatatttaccacaatgcgctgtggaggaagctcatacccagaattacggatagcaacccttactctttctctcgcttctttaacctcattgctaagaaaaccactcatctcaaaacttggaataccattgccaacatcaacctcaacccgtacaatctctgccttcaatccatataataccccactcaatacactactgtacaataaataccgtctcctttcactatcaatacttaaatatgtatttgttcagctattatgattatagtatctcaaaacaattatcaatatatattcattgtataaaaatcccaaccagacctcatgtgttatattgataatctggttggttcatctttacttcgcagccatcttagaaagtgcttcgttgtaatctttttctgaatacttctttgatattccatatcttatcataaatattatatcttctattgttgccgtcttaaatccctgttctttaccagacttaaacccatcctgtcttgcttcatcataatactctttccatgcttcacacataataaccgactcccctttcttactccctcaaattctttcagatacccaagtgagtcatatatcatagttcttagcggcattccataatgaatatgctcctgcagttccagtcctaatactacaagctcaattccatcaaaattcttcttaacaacatccctgaatcttccaagtgacagcttataatcatctgccataataacaccagacacatcagtatccatctcctcaagattatccgacttaacaacctgttcccctccaaaaagcactgcattaaaaaggtctgcaaaatgctcattatttcgccagaaatccttacttattgtatcattcttaatctcatctacctgtttcctgtctacactcttccccatatatctcctctaaacgcataatccttattataatacgcactgcgtatataatgtattaatatattatcattatatataatcaatgtcaatgtatatatcattatattttatatagaatatctctcctgtatgattcctaacaaaaaactccggcagagcctctctatatgagagttcatccaccggagtttaatccatactgatattaaattaatccatattaaacaaatcttttacctgaagattaagtattgcataaccaactccattgtggccatcagttgcctgaatacctatcttaagagttccatccgaaagcttctgtctcaatgatgcatcatctgcccctgacagactccagaaattatcaaccgtatattccacaccagatttaaccttagatgaacctgacgatacaggcatcgacgtaagtgaaacatttccagaaccatctatactgatatatccgagacgcttatctttagatgaatcaaacttaccatcttttacgtcagtgtcccctcttttttcttcattataaacatacataaatgcttctttaatgatacctcttccatcaataagatccgcatctgttattttaaaactaaaattcagctttctgtcagcaaattttgtgtaattatacttaatataactgctatatgccttctgtgtgtcatcataaacagcatccgtatatgaaacctgcggctcactgttaccagcaagaatagctcttacaaatgtattaacaaaaagctccatctctgcatcagtgccttctttatccatatcagaatgacctgcactagtatatgtaacattaccagcagaatatatatagtaattattaacagcatcctgacctgataatgaaaaataattcttatccccattatcaagagtataccatacaataggatctgaaccattaacctgtgtttcaagattaagagcaaaatactgtgcatgcgttggagcaacacttattgatgaatcaattccataaggataagatgtaacttcaccagtattcagctttgaaaggctgcttgtcattctggtatttgttgtattacctgaactagcaaatggtcctacgcccgataatttatatataagagtatctgttaaactatatccacccttcattccaatcaaaggtttcaattgctgggtagcataattaagtttctcatatgaaccagctgcttttttgcctgtaccattctccctataagacatacagtcatgtgtcatcagtacagattttccatcatcaatataagtttttatagcatcaattgcattggcagataaatcattatcattaccatagttatcagcaaatcccataacaatcatagaataatcatcaagaagcttaggattcttctttaattcttctgaaaaaactgttttggtcatttctttaaccttcagattaaaccctgtaatcccagcttctgacttgaatttttcatcaaacttgcttccaggagcaagattaagatgtgactcctgtgaattactcttaatctgtaaaacatttattgttctctccttattcttcaatgcaaatgcaccagatgtataagttcttaatcctgtatctgtatcagttatctcaaccttccagccaacataaccggtaagtccacttggcagagacaatgttgtactaaaacctccattagtccactgtatccccgtaccatcactttcacaatagaataactcagtatcatctgttgtatgatcttctgaaaacatactgtcacagtttctgtcaatgtatatcttaactttatatgaaccatcccttaccggaacagttacatttcctgaaaatgtaactaacaggctcttgtcaaaatctctttcattaacacttgcctcagttccatcatactctttcatattaggtgaaatgttgcttgtcggtttatagatataatttaatgtatctgatacctcatcattatctacccatacaatattagatgatcctgtctttgtaagctgcattgcaagattagattttctcatcttatacatgttagtgttactgtctacaactgacttattgccataatatacattcttatcaagtgctatcggcatacccttctgtgcaaattcaaaaagtttattaaacgctttctcagtcaggtcattagcattcagattatatgtctttgatgattctgtaaatgttctgtcagtattatacatatgagaaccaaatactttgccaactgtctgcgcagaacctctatcaccaataataacaagatcatactttgaaagaatatcttcattaagtcctgcaaatgcatttattgacatacttgtaacattaaccgttacacttgatgtctttggcaagccataccatgtcttaataatatccttaccgccatcattattatagccatatacaccaataggttcaatttcaagtacattgacagattcactaggtgttctcttatatgcgccaatgatgtactgaattatcttggagcctgtaaggtcagctgatacagttttattatccttagtaaattgctttgcttcttcataagttgtaccatacttaatatcactttcagcagctttatcaggatacacattacttgacataagctctgatgtaatagagttatctgaattgaattcccatacgtacttatcaacatacttctgtctatttgtttccgttgcattatatatagggaatgtagtaacccaattcgacttattgtctttaaaattttccggatcaaaaatcatctgataacttctccagtaagcaaatggtcctgaacctccggcatcttcaaagcttcttttttctccagattcaaggtaataattaattatcttgttgccattttcgtcatcaatattaatatatcctacatttccactataatatttacctgtgactcctccgcttatgccctctttcgtatgggcaaaatctgtgacaaactgatctctgtcaatgccagacattgtaagacatattcttgcaatattagaatacttattatcacttccaagacctttatcagcagaattatacattatagcttttcctttagtagcattcaccatatacaggtaaagtgctgtttctgcaggtaagtcattgtctcccaatgtccattttttctctgtagaagatacattagttccattcagataattatatgcagataatattcccgcattgtgaatcttacatgaaaaatatacaatagtcgcatcatctatatccttagttgtaacttcagacggtttcttgattacaagatcaacaaatccttccattcctttatcaccaaatacaaagaaagaaaatgcatctcttaacttagaaccgttttttgttgtcataggtatatagctattaccatcttttttacagaaaataagttttatattatcaacatctaaagtgccaaccttctgtattgcatcattagaagtagtgtaataattgtatgagttgccacttttatactcaaggcataaattataattagttccgtttaaaagaataccattaacataccgaagatacacatccatattcttctgtacatcactattagatgctaccttcttatcagtagcctttgctacaatatcatcccacttgacactaccagatgaattacctataatcggtcctaactcatcataataatcttcagaaacaatctccagaatcttcatcttattatcctgtgaatattccttaccattaataataaccgacgtatctgccaccgcatcagtctttcgtgtaacaattatcagaagcacaacaagacaaaacataactgcagaagcaatcactgccaatattctgtttttaccattttctttgaactttgacttcataaagattacctcccgtttacttaattatcagtaaaataatcaattatctgtgctgctgataacgtgttgccaaccttaagtgtattaacaacatcgtccttatctccttcaaccgatgtaacagacttgccaagtgttatattatcattaagctggtttcttgttgaaaatgttcttgaaacaattctcttttcattcatcctctgtaagcctaacgaaataacaatctgcggattcctgtcaattgacttaattgttgctgtatcaagctctatactatcctttgatattcttacatcaaatgatgtaacattatcacatacaagactcatttctgacttatctgaattgatataccatagctgctgtgttgcactttcataatagtatccccattcaatacctacctcagtactattctttttctcaataaccttattagtatatatagttacatccccattcagcttttcaatctttatctctgtcgcctcaagaatattctttgacatctgattaagacttatatccgcatcactctgtatctgtgccagagctgtctgcttcgtgtaacttctgaccgcctgcgtaataagcattacaagtgccataagaacaatacttgatattgctatcgctataagcagctccactaatgagaatcccttgttatccttcttcataactccactccatattaataaactagttcgatgtcgtaacttttccggtcttataccatagcttagattcataatcaacaccagatgatgtaaccttaaatgttcctgaagttgctgtattcttaagttcaaccggatccattcctgacttagtagctgtcacactgtcacatgaaccatctgctttgctgaacttaaccataattgtataatcatcaacattatacgacgaagtcccagcttcatatacaatagaaatccttgaagcactacatttgtatgtttctaatggacttcctgtatccttatatgtagtaaatacataagaatcaccatctttaccaatctccatgtaccaatttccattcttagccatagtacttgtctttaattcactcagacttgaataaagattcttattagctttcttggcatttcccttgttaagaaccgtaagacctactgttacaagaagtgaaacaactgcgattattgcgattactacaagaagttccaataaagaaaatccctgattatttaattgtttcttaaaatgtctgttccctctcctgctcatcatcacatctccattaaataatctttctataatattccgtattatgacggattagtaggtgcctccgttgtagactcaacattagttcccttaggatcttcgtacttcctccagagactgaatgtaaccatatccttataagtcatattgcttacactaagtgatgaatccttcttagattcaacatgcggattccagaatctgaaaatatccttatagtggactgtcttgccttttccattagtatctgtaagctctgcttcatggtcatcaataaatgttctgaaaagtgaatcagagaatatgttattagaaactgtcactcctgaatcaatcgtaattattccattagaaacaacaattccatcaaaatcactcttaatatgaacattaccagagcagacaacaacgcccgaagttatcttaagaatatttgattttgattcagacgaattactatctataacaagttctataccttttgatgcagatacttcagataacgcataagctataaaccatttcccttctacctgtttgctgaatgccttaccatcagtaacttctgcaaaaccatctttattaataatattgtcataaacatcatcaggtgtgtacttgctaagatcaatagcaatattattatgagcaatactattaagatattcctctgcctgctgagttgttgtatatgttactgaatccccaagaggcgcaagtatcttattaaacacattatatctgttcgatctgtctgaatattcagtattaaaatcaaaacttgaattatcagcaaagataccaaggctggctccatctgtaagactttcacttcttacaactgatgaaccactaagtccggcatatgtacctacagatttcttaatagcatttcttaaagacttagattccttaatataatcatttttctctgcagcactgcatttctgtgcataagaagtattattaaggaattcctcaaactgagtatctgtataatcatatataatcttagcataagtattaagtgatgctgtatccttgaaactgaaataataatatgttcttgacttatcataatcaattgtattaagaccagaaccagctatatcataatctcttgtcacataataatcatcaccattcttgcttaataaatcaaatccaaagaatgttgactcacttatcttagtctcacacttgattccgttgcctgctgtcttcttcttagatggattcttagagccactctttaaaagctgcgcaggaacaagatatatttcctgattagtatttactgaaattgattcacctgttgcaagcggtactgatgtctcaaacttaatatatgaacggccagcaacaacaagctttgaaagagatgaactgaatgtaattgtcgctctttctccattaataattaccgcactactgtcataatgagttgcattttccttaggttcatatccaaagccttcataagaaccactaagaactgcacttgaatcatccccctcaatagtaaggtcatccttaacattgactgcaccagctccattaaatgtggcattatttccaagtacaatctcatccgaccataactgtgaagagccaccaaggttaagctgtgacgcagataatgctcctgtctctccttttgacttaatattaaggttaagactacctccacagataagataactgcctgtaaaatcaagagttgaacccttaatattaagacctgatgctcttccagcatatgcatttcctttaattatcgctgctccgccgtcagtaatattaataccagtattaccaactaacgcataattaccgaagaatgttgtaccaacaaggtcttcgtccatgaaattaacatatatatcaggaagcccaactgctccattaaatgtaatataggaataatccccattctgtgtcagatacttaacgatacaatctgtaaatgtaattgcatacacattaagacctgtaccattattcttatcgcttgtatttctcatacggatagtattaacatcctgcaccacaagaataggctctcccgtagcattaccatcattatcaacacctgtagaataattctccagatatgaattcaatatttcaataaacttctccttgtgtccatcaaagctataattattattatatacaggcctaaaatctgttgtcttaaaatctggcaacagctttcctataagcttctgcatataattttctcttaaagcaacatttgctttttcattatcaatctcaaccaaagttgcaaaattattatgctggtcagaaacgaccttactataacttgataatgtggtaagctgttcctcatatgaagcattaaagcactccattgaagcttttccaagtgcagcatatatctcatcaacagcctcttctgatgtgtagaacgtctttttagactgtgatgctatcatcttcattttaaggttgaccattgtagttgtagtaatcagtgttgaaagaatcaatacaaatgaagtcataataagcactattacaatagtagaaccagaattatttctttttcttttcaaattcaataatactttccccataaactgtctccattctttcactgactaattaatcttagtagatgtcatagttgcaatctttgaatcatctgacatagttgaatcattataatatactgtcactgtaagtctgtacatagaatcttctgtttttgatgaagaaccagacttccagtctttaatattagaataaattctcgctgcagtatccttgtttcctgctttatcagcaagattacccataacctgagtattaaatgtaactttaactttattatgatcaaccaacattctgtatttctgtgctgatgctactgaaccatctgcattcttttcctgcgttatcttttcctgctcaagaagatatatattaaggtcactatatcttacattggtaagttctgccggatatttgtatgttacattaatcttatcattaacatatacttccatagtaccatctgtagttgttgtacccttcttattagtacttatataatcatcaaacggagtatagaatacatacagattctttatattcttcttaatctttcctgaaacgtaatagaccgtctgctttgtaccacttacatcttcctcacgttcttccgcttcaaaagtattagttgtaagtgtagtagtcttaacataatcaggataactaagcactgtatcataatgatatgtaacagtaataactgccgtctggtcaaataaaaccttagatgcatctgaagtatttcttgttacattaacatcaatagatgtactcttagtaatcttagacctgtcgaatgcctgctcacctgtataatatttaaaatgtgccactgcctgattatcactgttatcatcacgataaacgagtgaactgtccgccgaaacatctgcatatactgatattcctgcagaattaatattattattaggattatccttaaccgtactgtcagcaggtgttgtataaggtgatggatcaaattctgctttgatatagaatttttctttatttaccccctcataataaagaatattagaagcatctttcttattacccacagaatatgttgtgctgtcaatcccaccaagctgctgataagtatattgtccattgccaccagcaagcctgtccagactcatactctttgcttcctctataatattgttaattgcagtattagcattttcagtccttcttgctttattgttaattctggcagcattagaaaatgtactcagtaccggtagagatatgattgcaagaataacaatcgctaccagtacttcaaccagtgaaaaaccggaattattcaattttctattctttctatataatttcatatccctctccctgaattctcttattactcagttggtgtaactgttgagaatatatttcctgttcctgtcttaacatcaaatgatggttccttataatcacgctttccaccttcaattgaataaagtgaaatagatgctgttcctgtaacaacacctgttgcctcattataagatgcagataaggcatcaattgtgctcttatcagcatatgtattgacatatttaataaaattcttccactgactataatctgattcataagcaatattaatagttgacttatagccggtaagattagaagtataattgctttttccatttacattacttgaagcaatctgaccgaacttgtaaagaacagttgttggtgataaagaaaggcttcttacccatgttcctgttacagactctgtcttgttaaagaaatcaattgaattaggctgtgtgcttcctgccgcatatctgtcaagaagattatcatactgcttaaggtaattcattgtatcattaacatacttctgtttgttgttattcttttcttttaagtctctctgagttgtctcaagagtagtctttttagtagataaagtatctacctggtctgaaagattctgaaatccaaagaaataagcaagagcaataataagcactgctaatacaacaaccaataactttttgtctctttcagagatttttaacataccttttaacttatccatctgactcccctcctactttgttgttgaactcttagtactgctatttttagtactgtttgatgtattagatgacttcatatcagttgtattagatgttcctccaacaaatgtacatgataatgaaaatgtaacttcaattgtacctgcattatccttagtctctgttatagtaggggcatcaacattaagtacagaagaattcttctgaagttcctgaatgaacttagctactgaagacttgcttcccgctgttccattaacagtaattgctcctgatgcaacattgaaagactgaatagtaatatcacttggcatactcttttcaagataatcaacaaaatcctgtaatgcatcatcgctatctgatgtaagtgctgcaaacgctgcgatatcattatatttatctttagctgaataatattcattaacaacatcattaataatgctcagcttctttatactcttattaagagatccaatctctgcattaagagcaacaacctgaacaagtggaataagaacaaggagtgcagaaaccacaagggctccaacaaatcctacaataagcgtctttgtattttcttttctggcaccactctcaataagtctcttaggaataaaatcaaccggatcaataactgcacctaagttagttacataacttgtaagagtagcctcttcaacatatgctttcttgtccagtgcaatattcttaagtctctcaaccttctcaattggcatattaagctcattagaaagaagtgttgcaaaacccttaatagatgtagaatgtccgattaagtatgccttctggattgataatctgttacgagatacatagtaatcaataactctgttgatgttacttgccatataccttaatgactctgtaacctcatctccatcaaatcttgaatgaagaagtgtttcattctgaagctttgttgtagcagcctcatacttaagtccatatttctccataacagcattaacaagcattgactttccataaggaacatttctctgtaactgcaatacattatccttgaaaatattaattacagtaccatcattttcaacctgtataacaagactgacttctggtccaatctgctgtttcataatctggtatgtactattacctgcataatcaacaaatgccaccttaagtcctaaagccttagcaagtccatagtaagactctacaacttctgatggtacagcagcaaccataagtttaattttttcctgtccctgatcttctactttctcaagaaccgtgtactgaatgatatactcatccatattaacagggaaatactctgtagcattagcctgtacaagtttatcaatcttattagccttaacattaggaataagaacttccttagttgcaagtcttggagaactgatagaaaatgcgacattattagcattaaatctatgctcgtccataacaaccttgattgccttagcaagtacgtcagtctgctcaattacaccatcgacatagcagtcttctggtgcaggaattgtaacagtcttatgaacgacactgttcttacctgatttagtgatttcacatattttaatatactcgttattgataacgatacttaccaatttacctttggctttagatgcagccataaaatcctcctatccagctccccacataataagctaatgatttctagttataaaaatatatataaatttcctgttctttctatatagacaaaaactctcctacataaatatacagattagttagaatcccataaaagaaagataccagttaattatattcgtaccaaaaagcatggctattgtaagccctgcacacaaatatggtccgaatgccagtacatgttcagcatccgtgactttcatacggatggaatgaatgactgcacccaagatgcagccaatcagaaatgccaggataatgcacttccatcctaaaaataatcctgcaaacgccatcagcttaatgtctccaccgccaaaagcgtcaattcctttaatcgctcgtccaataaaaagacatatgagcatgaatccacttataacacaaaaccctattagatagtctaataggttcttgtgatctaatatgattcttatcactgccaaaacaccaattgccacattaagtgaaaatggtatctcgaaagttctccagtcaatgactgaaataacaagaaatattgaaaatgcaaagcacatcaatatgcttaccgcattaaatccgtgaactaagaatactatcacatatgctatcccattggtcgcttcaatgattggatactgcggtgatatcttagttttgcagtgtctgcatttcccaccaagtattatgtagcttaccagtggtatgagatcataccactggatttttgcgccacatgtcatacaatgcgaatgttctgtagctatattctcttttaatggtaatctgtaaatcagtacgttcaaaaaacttccgaatacgattccgtatagaaagataatgaagtacagtggtaattcgtattgcatgatttaatgtttccttagattatatgatttaattattttgaagcagatgaagctgtaggatcatcaattgaaacctgtcctaatgagttaacattaattgttactgtcttaccactatacttctttgatgtaagttttgtctttgtcacatccatagttcctgtgaattctgaactgaaatctgactgagtattaagagtacaactagcatctgttaatgttactaatgcagatgaacctgtacttggaactacactagcatatgctgactcattattaagagcaatttctgctgaactcttaagctgttcaatgttctgagcatcctttgactctcttgacttttcaatgttcttgataagtgttggagctaacacaccaacaagtactgccataatggcaataactacgataagctctactaaagagaaacctttgttacctaattttttctgtgtctttttcatgtttcatatctcccttttgaaatatatttatataaatccgttctcgttaagcgacctgcagaacagactatatactatccctgtgctcctaatgtattatagagctgaatcattggctgatagattgcaagtattaacataactacaactaaagccataaggataataataattggttccattaatgaagtaagagtctgtgtctgaacctctacttcttcttcataatagactgctgaattggtaagcatctcttcaacattaccagtttcttctccaatgcctaccatatgtacaaccatcggaggaaaaagtcccgatgttcttaactgattagaaagtggtaaacctaatgacacaccactctttactttttctaatgcatcataatataatacattcttcatagtagaagctgatatctcaattgcatcaatcattggcatacctgcctgtaacaatgtactcattgttcttgcaaatgaagcacatgctgacttagtctgtaacaatccgaatactggaatctttaactttaatttatcaaggttatgccttccattctctgtattaccatatagcttaactcccacaactattccaataacaacaataagatatacataccagtatcctttaacactgtcactcattgcaagaatcattctcgttgttattggaagttctgaatcaagatcttcaaacattgtcataaagcttggtataacaaatgtaagcattactacaataacacctatcataacgaagataagcactataggatacatcattgctttcttgacaacaccttttaacttggcgtctttttcaaactgtattgccattcgtgtaagagaattctccaaactaccggaagcttcaccagccttaatcatatcaacaagaatacttgggaactcttcgttctctctcattgaatccgaaaggttttcacctttttctacactggactgggttctctcaattgcttctttaagtctcttattctctgtctgttcaccaagcatctccaatgcattaattacgcttacacctgctttaagaatacttgcaaactgccggcagaatacgctcatatctcgtgccggtattttctttggaccaaaaaatgatagattaacatctttatccaaagctccctgcttacctattgatataggagtaaatccctgttcctttatctttctggctgcttcatctttgctttctgcttcaacagcacccttaacatcttttcccgaagcgtcaaccgctttgtatgaaaatgtttccatattgcactccccattcttagtaaaatctttcctcaattgtgcgtttagtataacatattttataattcaggacaataattttaccaaaataaacaaaaaataaaacatttattaatttgctctaatatttataacatgatattataattaaaaactacataccaaaaggggggatttttgtgaaagcatttaatttattcatcaaaaaatacaatatatatctattactagcttgtattattttattacaaactgtgtgtttaactgtttcttttgccaataataagaaaggatatcattcagatgaactatggagttacggctttgcctgcagctctgaaggaatgaatgtattctcagaacgtgacggacaaactccaaaaaactttgacaaatgggtcagttcttctgtacttcatgattacataactatagataaatctgaaacttttgattatgtttcagtatatcagaattctgcagatgactatcatccatttttatattttattctactgcactttatatgttcaatttttcctggaacattttctatgtggtatgcatatgtaattaatataattttctttattattcagcagatatttctgttcaaactaatcaggagtcttactggcaattcacactggggaatcataggaacatttttcttcggattaacaactggctcagagaacattttatttttcctcagaatgtactgtcctgcaacagctctttccgttgtacttttttactatcttaccgaattatataataagcgtaacgacagcaaaatctcaaaatcactgtttatcaaactatttataacaacacttgcaggatgtcttatgcttcatgaattcataattcttgcttttatcgctgctttattatacggattatattatttattcacaaagcatgtaaaatacgcattcatttttggcggaactatgattagttctgctttattatcaataggaatatttccttcaacaatcccgcatctgtttggttctacaggaaccttcggcggacatgtaaagaaatattctttcatgttccaatttaaaatatactggtcttatattactaatgaactgtttggcattgcaacttctccatggcatactatgacaagtgtatatgttttctatgcaataattatatttttatttttgttcatacctttttgttttatattcagacatgaaaaatggcttcatacattttttaaaaaacttaaaaatggattcttacaatttttaaagaagttcaaacattttaattatgcgtttgttccgcttatcatatcagtcatatttataatagcaatcaattcacagatgacttctattatgaatatgggaagattcgcaaaccgttatattatgattatatatccattatttgcagcttttgcagtagctttgttatactatataaccaaatggattttcagaagcaagaaaatatgctatgcaatatgtatggttctttctgttttatttattgtgcttagtaatttacttgcgcctcattgttacagaatgaactatcctcacgcagaaatgacaattgatgccattgaatctgattcaaattgtatagttatgttaagttcgcagttccttctcacatgccttactgacaagttaagtgataccgaacatttctatgctgcaacttaccattcagcacttacagatgattatgatgctgactttgatttaaacagcaagccattatatcttttgctggatgtaactacatttgaaaataatggtgtttcacttggtggaattcaagccccacagatacaatttgaagcagattcattatatgacaaagacgaatatattgacttttttaaaaatcttgacatcgcatctaactttgaacttgtcggcattgactataatatgtatggcagaaaagttgaaatatacagattaaattagatttgaactaaaagcaggagatctagacgatttatagccaatgattccctgcttttattattctataatattcctttgttattcacagtgtctccaatcattcgcatccgttatatctcccggtgtcacctcataccaagcaccgtctgatgtatcaaaaacattcccattattagtcgttacattatacaatcctgaagttgtcactttcatatttttattatatttatctatattagttatcagcttatttgtaaacggattagttggattatcaacaatatcctttagtgcaatcgttggaacatccgcattagtcatatattcatcagatacattaaaaccccttgaattaaaatctttcacaagaagcagcggtgaatatgcctgtatatccaattcactgtttatttttagtgaatcaaactgaccaagttcttttccatgatcacttacaataataattctagtattatcataaacatcatttgcttttagatattccatccactctccaatctctcttaaactggctgcaaatgtctgataatgtgctacgcctaccgatttatccatcgacatagttcggccatcaatacttctgtcttccatctgctgtataacctgttctttatcaacattccttaacggcagataatctggatatgacaatatcgaagattcatgagttgtactattctgcatcattataaaattatttttattatcatcttcaatagttgtaatatcaggcaggctctcaagaacggtataccagtcatagtaagcattttatttttctccccttttagattaatactttactataatatatctatttttctagctattttcaagaaataattaaatgctttattgattcattgttcctgatacctataggtagtcgcattatcacttgacttataggacatatccgggctgaatccttattcagccttcacttcccctcccaatctacctatagataagcttcctcgtgcctgcctgataggtatattcctgcaatttcatgtatttctgcctgtattttacctatatagcttaattatattttgttcttataggaacacgcagaagtaagtccctgaacagaagcaggcttctccataaaagaaaagcaatgccagtatccactcttcctaacattgctttatctttatatattatattgttattctgtctttcttatcagctgtcactccatatccggacacttatatcctgcattaatcatattagctcgcagcttttccacacttatcccaagcttttgtgcacccttttcaatacttatgctcttatcttcgaccagtgaatatatcatctggttgccgccaagactaagtccctctttcattcctttctgaagtccctcttttattcctttctcaattcccctgtcttcaagcctctgcgctacatcacacatattgctcaccccttccttatctgacaatatctcttcatatctgctatctcctgtcataaccgataaaaactttagtatctcatccacatggttaattgttgtcttatcatctggtatgtaatctttgttctttctcttgttcacaaagaaattagcaactatcttataatcactcgtaaactttgctatctgttcatctgtcagccacgctatctcaaatacattagctttagtgtcattaacatacttatccagattatccggaactttaatcagagacttaagattctttggtgctgtccattttctgtctgtaccataatacagaaccatcgttattaccggcactattgttttcttatcacattgacctctgtatgaagcaccttcatatcctgatattcttgccggcattcttttctcaacctttgtctgattctctatgccatacatgaaatcatttttaatatacaattaatatatatttttgtcaataccgtaattgcggtatattacacattatattacctgatacctataggtagtcgcattattgcttgacttataggatatatccgggcagaatccttattcagccttcactttttctcccaatctgcctatagataagcttcctcgtgcctgcctgataggtaatttccgacactttcttgtatttctgcctgaaattagcctatatagattgattatttattgttcttataggaaatccccataataataattgcatgattaacagtccccaagaaaaaaacaatgccagcacatcaccagcattgtcatctcttcaatcactattccccagactttcttaaagcctccatatatctttccagctttagttttgcgtcatcactaagctcctgataagtttctatcaatgtgtattccttagagtctttatcaacatatgcataatccatatactttcttgaattattcatatcttctgtgccagccagcagttcatatggagaaatatcgagtgctttgcatattaccattatcttatctgctgacggattattcttctttatcttccaatcacttactgtactctgagaaattcctgtcctactaacaaactctgcctgcgacattcctttttcttcaagatacttatatattctctcacctatctgcatataccaccattaatagaactgattaactctcttagtaacataattgacatcctgtgcatatccaattgcattatcagaatcaatcactcccttattatacagatcaagaagtgcatcatccattgatatcattccctcttttcttgctgtctgtaaaacactggatatctgatatgtcttggcttcacggataagattcttaattggaatcgttccatgcataacttcaaatgcagcaactcttccacatctgtctgctgttggtatcagctgctgtgaaataactgcttcaagaacaactgcaagctgaattcttatctgctgctgctggtgcggtggaaacacatcaataatacggtcaattgttgccgccgctccaattgtatgaagtgtcgagaacacgagatgacctgtttcagctgctgttatagcagtagatatagtttccagatctctcatctctcctacaagaattacatcaggatcttctcgcagtgctgcacggagtgcatcagcatatgaatgcgtatcaagaccgatttctctctgattaatcattgcttttctatgcgaatgaagatactcaattgggtcttctagtgttattacatgagcattacgttcatcattaattttgtctataagagaagcaagtgttgtagatttaccggaacctgttggacccgttaccagaaccagtcctcttttcttggcatacaattcaacaacagactttggaacaccaagactttccggcttaggaatctctgttcctacaatacgcatggcacatgccacagaccctctctgtctgaatacattaactctgtatcgtccaatattaggaacagagaatgaaaaatcaagttctcctctgtctttaaacattgcctgctgcctgtcatccataatatcaagaataagcttttcacagtcatctggtgaaagcttaggataatcaagatccacaagttcaccattaattctgactcttggtggaagtcctacagtgacatgcacatcacttgccttcttttctttagctatcgaaagtaattgctctacagtaaacattattaagcccccatatatctataattgtatatctggcagattcttagtcaatctgctcaagttcaatttcttctactccggaagaaactgatattccagaagaagctgatgtatctgctgccttaggtcttgaatcatcttcttcagcttcataagttgctttaaccatctcagctatagttgtgacaccatctttaaccgcattaaccgcagccatcttaagcgtattcataccctcacttatagcctgttttttaatctcttctgcttctgcatgccttgatataagtctctttatagacggtgttatcttcataatctcatatataccaagtcgtccatagtatcctgttccattacataacttacatccgcatggttcatatattgtaaatggctcgtcaggattaactccaagcatctccttctcagctgcacttgcctcttttggcatcttacagtcacacagctttcttacaagacgctgtgcgataataccaacaagtgaatcagctatgaggtatgactcaattcccatatcttcaagacgggcaacagaacttgccgtactattagtatgcagtgtacttacaacaagatggcctgtaatagatgctctaaccgcaatctcagcagtctcaccatctcggatctcaccaatcataatgatatccggatcctgtcgtaagattgatcttaatgcagttgcaaatgtaagatttgctttattattaacctgaacctgattaataccatcaatattagcctcaaccgggtcttcaacagtaataatattaacatcttctgtattaagttcacttaacgcagtataaagagttgtagatttaccagatcctgtaggtcctgttacaagaataattccatgtggattctttaatatatcatcaaataccttaagatcagccggtgtaagtccaagttttgatttatcaatgttaaatccttccttggacgcaattctcataacgcatttctcgccatatactgtaggaagattagatactcggatatcatattctcttccatctacgttaattgtgatacgtccatcctgtggttttctcttctcagaaatatccattcctgacataatcttgatacgggttgtaatagcaccaagaagtgtattatcgtactggataatttcacgaagattaccatctattctgtatcttacacggatatctctttccatcggctcaatatgtatatcagaagctctctgtcttacagcctgctcaattacactattgataagctgaacaataggcgcattctcaatctcttctcttctcgccttgtcttctttagtttcttctcttacagtctcgccctgctctttcttatacagatccacaatactctgtgcctgtttctgtccaaacgccttatctaaaaatgcattaatatcagttgcattagcaagaaccggaacaacctgtttaccagttacaatattaatgtcatccatggcaagaatattagtaggatcagccatggcaaccctgattgctccaggattatcaggtgcatcacctaatggtacgagagtgtactttctcataatattctcatctaacatagacagaacatcatcacttatctccgtctctcgcatatcaacaaaatcaatccccagactgtcgcaaagtgcctcattaatatctctctgggtagcatatcccaatgctataaccatctcaccgagcatcttcccctgctctctctgtcttgaaagtgcagtctgtaactggttctcatctataattccctttttaacaagaacatcacccaatctaactttctttctgtaattcaccttcaacctctttccgcaggcagtctccactcctgctattgcgcatttatagtaagattatatcacatcaacatactatatacaaacagctatttaacctcttttatagtatagttgtcacttttactgccaatacattcactgtaaagtgaatcgtaatctgtactgcagacatacctcttttcttcattatcatggttcatatcaaatgttccatctgcatttatataagcattgctatatgaaaatgcaaaataaaccgttttgctgtcttccgagtcagatattgtcgctgaagcagttatatatatgtaattattagtctctccagcatttccttttttctgtaaataatatattccagtaatctttgcatcactgcatgtttcctcattaatgtgatacagataggcagtatcctttgttgctttatataacatatgaaatgtgttatctgccgtttctttattaattgtctccagaacttctttgctaacctgttctataacctttttatcaatcagcgatacatcatcaacatattccggaagcttgtctgcattataagaagtttctatattatgtacaagaaatccgtgtcttgcaatatcttcataagaagtattgcatgttatcttcactgaatccccaagacttatattgtcttttttatcaggagtaaatgtaagtcctgacagatactcatcttcccagttattagtgataacaatgccagcctgcggacttacaccagtaaatgtaacatcaaccttatcaaacaattccacagatgttccttttgatattcctgatgcttttatcttcttattgccgcctcccatgctgactcctgccgcatcctcatattttttatcaacctcaagccttactttataagtatcaccattggcaatatcttcttcatctgtacttgtttctatagaagcaatcagcattttaacattgtatgatttatctgaatcggtacttttacccataagctccttatacaacttatccttattaagagtaaacactggttttgcatatccgttagcaccttcataacttatagttatataatcccacacatcaaactgctgtgaatgtataaaaagtgcaactgcaattaccgctatcactccagccgctgcaataatcagtcctacgcggcgtttcttaattgtccgtcccataaactggaactccttcttaatctccttttcaattgcttcacccttatgtgaaaattcttttaactccatatcatactcctactggtcttgtcgcctctcttaacatatccttttcttctccatcaaaatacgactcaagtgtcttatatactctttcctgatacttattgagccgctcaatatccacagcatcaagataatttacatcaacaagttctaaatctatcggaacaactgtaagcatatcaaactttaaaaatgtgccatattcattgtcgaagtctttctgacatacaatctcattttcaattcttataccgaacctgccctcaatatatacccccggctcatcagatgtaaccatgccctcttcaataacggcaaggtcattcttgcccggattgtgcttccatcgaaatccgttaggactctcatgcacatttaaaaggtatcctatgccatggcctgttccgcaacggtagtccattccgacattccacagaggtgctctggcaagaatatcaagactgaaaccgttacagccttttaagaattttgcatttgccaggcttaacatgcctttaagtgtaagtgtgtaatacatcttcatctcatcagtcacaggtccaagtgctattgttcttgttatatcagttgttccacgcatatactgtccgccagaatccacaagcagcatgccttccggctttaagacagccgcattggtttcatctgcatggtaatgcatcattgcagcattttcattatatgcactgattgtgtcaaagcttagttctatgtaatcttttatattgcttcttaaattatcaagatatgccgctgcatccgcttctgttatattacctgatgcaacatttttcttaagccagaatatgaattttgttacagccacgccatcgtcaacatgtacgctgtatagattccttatctctgtctcattctttattgccttaaaaagcattgctggattgtcagacagtactgcttccacatctcttccagactgtataagctgatatatacgcatattcacacgcctcttatcaataagcacttttccattcattctggcaatgtcttcatatatgctgtcatatggcagcacctctacacatgcctctccgaatttggccagtgtcttatcatcaaacctgtccttatcagtatatatgtatgcttcatccttagttatcactgaatacgccataataacagggttgcactcaacatcgcatccccttatattgaatgtccagcatatgtcgtcaagcgttgacataatatgtatatcagcatttttattatccatgtactttcttattcttgaaagcttgcttattatgctttctcctgaatacttttcatcaagataaaatgctttgctgtgtggaaacgctgccctgtcctcatatatattctcaatcgcatcaaaatcatacaaacagcctgctcctgcttttttacatatatcagacagctcaattccttcttcagccggcatggttcttccatcaaatcccatgctcattccatctttaactatactctcacagtactgtgccacattcataacacccggagcgccgaccctcatcagtgaaaagcctgtcccttcaatctgcttttcagcctgcacgaaatatcttccgtcagtgaaaagccttgcatcatcctgtgttataacagccgttccggcagagcctgtgaatccggtaatgaattctctttccttaaaataatctcctgcatactctgatatatggtaatcacctgttactactacatatatatcaacgccttctgatttcatgatatcccttaccttagataatctgcccgctattacctttgcatctgtaatctgcattacatgtcctcctgactatattatcatataagtttccgctcaataagcacttctcttaatttgccaagtgcctttttctctattctgctcacatagcttctgcttattccaagcctgtcagcaagttcattctgtgtgcactcttttgcaccaaaaagtccatacctgtattttaatatctctatctctcttggtgcaagtaccttttctatattaccatatatacacttaatctgctcataaaacatataatcttccacagcatccggctgtttcttctctgaatcttctcctataatatccttaaggcttatctcatttccctctttgtcctttcctataggctcattaagagacacttcccgttccttctttttatcctgacggaaaagcataagaatctcgttgtctatacatttggcagcatatgttgagaatctcacatttctttctatgtcaaatgaatcaacagccttaataagtcctattgttcccactgaaataaggtcttcattaatataatcacgttcagtagaggtatattttttgactatatgtgcaacaagacgcatgttcttttctataagagcatttctggccacactatcgccttcgcgtaattttatcagcaattctttctcttcctgtgccgataatggtttttcaaacgttttcaaaaaggcacccctacacatttttatatatcatatgtgtaaaggtgcctttaattgcctatccaactgtctctttaatttaactgtttacttctgtttcttcttcctggcgtcttaagatatcatacttatcaagctggattcctaaatcaatatagagattctgcttaggatgtggacagctatccatatccttaccattctcatcgacaatacgcttaactgtgacttctatattctgtccatccggcttcattacttcaattgtttctccaactgagaacttgtttcgctgctcaatatggtaaagtccctgctcgttaacatctcctacgataccaagatatgtgtattccctgatatatgtgttactgtcatatatctgtgtgttctcgtctggctttccaaagaagaaacctgttgtatactgtctgtaagtacatttgcttatctcactcttatagaatgggattctagccttgtacttttcaggatcttctataaaatcatcaatagcaagtctgtatgttctcgcaacagttgcaacatacagagctgtcttcatacgtccttcaatcttaaatgagtcaatgcctgaacttaccatctctggaatatgctctatcatgcataaatccttagagttaaatatatatgttcctctctcattctcatatacaggcatgtactgtcccggtctgttctcctcaacaacagcatatttccagcggcatggatgtgtacatgctcccctgttagcgtctcttcctgcaaggaagcttgataacaggcatctgcctgaataagatatacacatcgctccatgcatgaatgtctcaatctccatctcatcaggaatatgctctcttatctccttaatctcctcaagagataattctcttgctgaaaccactctcttagcaccctgattccaccagaaattatatgtcatgtaattagtattattagcctgcgtgcttatatgtatatcaatatccggaagtacttcctttgctattgtaaacattcccggatccgatataatgagtgcgtcaggtcctacttccttaagttcctcaaagtaagctcttgcgccctcaaggtcatagttatgtgccagaatattagctgtaacgtataccttgacatttctttcatgggcaaacttaacgccctctttcatatcttctattgaaaaattcttagccttagctcttaatccaaatgcttcaccaccgatatatacggcatctgcaccgaatattactgctatctttaaaacttcaagactgcttgctggtataagaagttctgtttctctgccattatacatatgtcctgccatattattctcctttactgtttcacactgagtgtaattccatcgccgataggaacaatagatgtcacaaaatcctttgtatgagtaagctcatacacatattcccttatccttgtatgaattgttctgtttcttctcgtaactgcatagcgggattccactatttctccctcctgcagaatattatccgatataagaagtccgccttttctaaggactctcttaatatcaggaagataattaatatactgtcccttggcagcatccatgaatatgaaatcatatggaccttccagagtcttcaacacttccagcgcatctccctctataagtgttataacattctcttttcctgcccttttaaaattatttcttgccacaggtattctcttatcataattctctattgtagtaattgtgcatttttccggcatattctcactcataagaatagatgagtaacctactgctgttccaacttccagaatcctttcaggctgtacaagctgtaacagcaccttcagcaaattacccatctcttttctaatgattgggacttcatccgcaatcgcttctttttcaattgtattacatatatcagaattaccacaatcaagagaattaatataggcaactactctttcattgactatcatatattccccttacaattaagttattcttcctcactgtctgactgtgccagcacttgcataatctcagtaggtgtcattcccgtgttaagctcataagttccacctataaacttatccttataatctgagaactgaatctgaaaatatgctatcgttttatcatgtacaagtcctttatcataaagcatgccagcaagcttcttagcctgtatgtctgttgttatagtaacctcaactgtacgggcattatcatctgaatcaactgcctgttcattaaatatcttctcaccaaatgaatacgccttgcttcccataaaaaacacgagatatattcctaaaacaattattaaaacattcagcgataccgataccagcatcctgattgatttattgctcataaaacctgattctcctcttctttaataagctacactatatatgattcaccctaaaaaatcaaggtccatgtctactgcctcggcaatatccttatatatatctctcataaatctgcaaaatgtaatctctgtcataagatatctgtttacaatgtcctgattcctcatgtcggcatattccttattaagattctccattgctgcaaacatgtctggaacattttctgaattctgtaattcaaaattcctcatacggaattcatccacctgtctcttcaagtcaggcgtcctgtctatttcagactgaagtcttctgtattccctatattcttcactgttaagaatttcatgtataatctctttcttaagttcatcaattctacgcatgaaaaacacctctccaactgtctgcagtaatatccggcaacatatattatatctgtgcctccataatgattggaagtatcacaggatttctcttaatcttcttccagagatactcgctcaagtcatctttaataatattcttaatcttactccagtcagtaatattcttatcaagacacttttcaactgaatcagatacaattgctcttgcctcatcaagaagctcttcagcctctcttacatacacaaaacctcttgtaacaatatccgggcctgctataagctgtccggtatatttttcaagtgtaagaacaacaatgataataccattctctgcaaggttctgtctgtctcttaatacaatatttcctacatcacctacgccaagtccatcaacaaaaatagctcctgtctggacatgatctacaacctgtgcatgctcatcattaagttctaacacatctcctgatttggcaataataacatgatccttgtcatatccaagtgacataacaacatctctctgtgcaacaaggtgtctgtactcaccgtgaacaggaatagaatacttaggctttacaagagaatatataagcttaatctcttcctgacatgcatgtcctgatacatgtgtatcctggaatataaccttagcacccttcataccaagctcattaataaccttggctactgacttctcattaccaggtataggagttgatgaaaatactacgcagtcgccaggctggatagatacctttctatgaaggttagctgccattcttgaaagagccgccattgattcaccctgactacctgttgtaataagaacaatctgctcaggtgtataattcttcatctcatccgtttcaataagagttccgtccggaatcttaagataatcaaggtcttctgcaacctcaataatattaaccatacttcggccttcaacacagacttttctgccatatttaaccgctgaattaataatctgctgtactctgtctacattagatgcaaatgtagctatgattattctgctgttcttattgtcattgaatatcttttcaaatgtagctccaacagttctctctgacatagtaaaaccaggtcttaaagcattcgtactgtcgcacataagtgcaagtacacccttctttccaagttcaccaagtctttgaagatcaataggatcaccatatacaggtgtataatcaaccttaaaatctcctgtgtggacaataattcctgccggtgagtatatagcaagtgctgcggcatctgcaatactatggttagttcttatgaactcaaccctgaaatcgccaagagttacagattgaccatacttaacaacctttctcttaactgactttaacatattatgttccttaagctttgactctataagtcccatagtaagcttagtagcgtatataggaacattgacatcctttaaaacatatggaattgcaccaatatgatcctcatgtccatgagtaataacgaatcctttaaccttattaagattctccttaagataagtaacatccggtataactaaatcaataccaagcatatcttcctctgggaaagataaaccacaatccacaacaacaatactgtcatcatactcaatggcagtaatgttcattcctatctgctcaagaccacccaatggtataatcctgacagacgcattctctgcttttttcataaacacctcataataaaaataaaatataaaatatgaataaggctcacaccttatttaagttcaacatcatcatccattaattcagaaaacaccttgcctaccacttcaagttcactgtcttcctctacaaactcataaacagcttcttcacttgccgcatcagatgtatccttaagaatataagcttctgcttcctcgtcctcattatctgactctgatacaagcaggtaattaattccgttaattctagtttcttcaatcacataaaattgtgtcttctcaccgttctcgtcaataaattcaagcttttccatgaaaaacaaatcctccaaatattacttctgtttagattccatatatccacgcaaaataaaaacagccgcaagctgatcaataactgtcttgcggttttctcgcctcatcccgcattcttcaaggacttcgtctgcttcaactgtagtaagtctttcatcccacagtgtaacaggtaatcctgttcgtctttccagtgctgctgcaaattcttcacaggccttagcccgttccccaatagtatcatccatgttcttaggatagccaaccacgatttcagttacatcatattcggatataatctgttctatcctggcataagttcttcgtaacttattattctcttttcttgttatcgtttcgaaaggctgtgcagttatcccaagcggatcgctcaaggcaactccaacagtcttcgttccgacatctaagcctataattctcatattataagcctttaccttcaatgaaatatcttacaacctcttcaacaagctcgtctctttcagccttcataataaggcttcttgcattgttatggcttgtaatatatgttgggtcaccagacataatataacctactatctggttaaccggattgtaccccttctctttaagtgcaagatatacctgctcaagtattccttctactgaaattgtcttctctggctgagttttaaaaaattgagtgttgttatctaccatatctaccacgccctttcgtatattgtttataatataataaataaatgaattatacaagtatttaatccaaaaaacattgtaaaaataatgtaaaaaagctgtccggacgacatgtatttgcccggacagccctgttataatcatacgataatattttgacatatattttaattaagatttccgccatatgaatccggcatcgttcccattgtaatattgagattgccattccttactcttaactcatttatgaactgcttctgctcgctctcgtctttcatcctgcactcataggtaagctcaaacattgtacccatattagttgtctttacttttttaagtacattttcactaagatacttatcaaatatatcatcaaatactgccatatagttaagattctctggaattgtgattcttaactgttttctacgttcatctcttgttccaaatcctgttaccgatagcactacaaataccagcagaattattactgtgaaacaccctgcaaatgtcacaaatccaagtccacatgccagaccagatgccattgcaaagaatactactgatatatctttagcacttcccggtgctgaacggaatcttactaaagcaaaagctcccgccattgaaaacgctcttgcaacattacttcctacaagaagaataactgctgccactatcgctggtaaaagagcaagacctattataaaacttttattataaccatccttcttcgatacaagtgtatacacaaatgctatcactaaaccaataacaactgctgccaatattcctaacattgactggctaatgctgattgtattctctgatgttgatgtaaagattgattcgaacatgtattttctcccttatccattaaacttgtgtaattcgtaaggacatactgcttatattcagtaccatacttagaaaacgataccgggtaaacattaagttctgatattatcttagtaaaccacagcggaacagcgccgcttatcttaacttccattaaatacttaccatccggcaaaagcttctttccatagcttccatgctcaagtcttatatcttcccttctggtcgtaatatttttatcaaatgtaatcctgaaatcaccgtcatctttctcaaagtacgcgaatctgtcatatgaaagataaactttaggctgcaaatgatagaaattcttgaagtaatcaatctccttaagcacctgcctgtttattcttccttcatggctatctggacatatgtcgtcatcaagaaaataatatgcctcctgaagcgtaattgaagttcttcttttattgacaataccattatacttcttcttaatctctacaaaaacgttatctgtaagctctggcgtcccataagctctcagtcttaacttttctttgtataccggtttctcaatagaagctcttataagctggtcattctcagtatcataatatatgttgctgattctgtaagcctcaccatttctgttatatgcatccggattcatataatcagatatcttgtaagtcagcttatgaaaagtatcttcatctataatgtatttcttctcataacggttaaaaacttcaattgccataccaggcactcctttctgtctcttttgttcttacaagtaagatattaattggaaaatgtgaccaaactatgtaaaaagtaagtaaaatcaatgtagttttgtgaacttgaagtgtctggtaattaacagagcccccacatttcaacttaaaaacctacacaaacattactttgttacagaatagtaggtttccaaaagcatccgataacatccctatatattctaaaacctactaacagcttctaaatgtataatttagtaggtcttcaatgcttgttagatgtacctaatcacctgtttttctttctcataacgtcaaaaaagcccactaaatcacgcctaataaatgatttagtgggtctttcacaatttctcatgttacaagttctaaaaataaacctactaaatcccgtttctcattatatctagtaggttttggcatattttcaagcagctattgcagttaaatatgcttttatccccgccagcagatgccacattcaggcataataccccagcatatatgcaacaaccagcctatacagcagcctaacgtctatacaacagcccagcatatatacaacccctggctagtcaaaaaaggatgccacattcgcggcatccttaaaaaaactacttcatatgtacatcaagctgattgaacggaatctcaattccattctcatcaaatatattcttatatctttcaagcaggttaaatcttacattccagtagtctgctgtattaacccatgctcttgtttcaagtgttacacagctttcatcaagactcttgacaacaaccagaatatccttgtccttaagtattcccttctcgctgttaataacctgttcaagaagcttcttggctttaggaatatctgatgaatagccaattcctatctggatatcaattcttcttgtattctctgcgcctacgttaacaatgcttgaattagaaagtgaaccgttcgggagcattactactttattatcaatagtaacaagccttgtgtaaagaatctctatagactttacagttccttcattagttccgactataatataatcaccaaccttaaaaggcttgaatataagaataagaattcctcctgcaaagttcgaaaggcttccctgcagggacataccaatcgcaagtgctgcagaaccaaaaagtgtgagcagtgatgtcgtctgaaatcccagcttatccacaactatcatgataagtattgcatacattacaaacttaagcactgataccacaaaattaacaacgcctttatctagcgtgcttctgtccagcatcttctttacaagcttatcaagcaccctgattatcttcttgccaataaaccatattaagacagcaataacaattttaccaataagtgaaacggaccagtttcctaaatcattgagaagctgcttgacatgggcaatagaaaagaatctggttatttcatctgtttcctgctggattgttgtggctgcatctgccacaagtcctatgaatcccatagctgatccccctttgtattatttcatcttctttttaagctgttctaacttcttcttagtctctatatcaatctcttcacttgcacgcgctgcttcttctgcttttcttacagcttcttccttagcctgaagtgcttccatgcaggctttctctgcctgttttcttgcttcaaccgcccgctttgcttcctctgctgcagcaagttcaagcatttcagcctctgctgcctttctcatggcttccttctttgcaattgcagccctctttaatacagcaatctcctcgagttcaagctgtgtatacggttcactgttatatataacgaatgaaagtccgggaagtgtaatatcaatatattccatatcatcaccatcattatctgatttgataatctgtccattaaccttctcgtctccaccgaacttcttccactcactgttaaatacttccttatactttccgcgcacatcaacgtgaagtctgtagttttccctcctaacaggagtaaaatttacagcaatcacaagcttatcacccttgctgtcagctctctgcattgcaataacagtctcttcaggattagaattctcgagccacataaatccatcagggtcattgtcaagctcatatagagccgcatttttcgcatagaacttattaagctccgacatgaatttctcaagtcctgcatcctgtcctgctgcaaacatcttgcttcccggatgtgcatacatgaatccaagtgcagccttgatatctgacaaatgtgccttctcatcactgcctgacaccatatccacaaatgctttctccctgaaatcatcatgattgagcgagagcatgaaatcctctccgtaattatagagcattccatatgtcagcttgtcatactcaccttttctgaacagcgggtcagttcccatgaattcaagaaaatccttagtccagcagttattctgcttataagtaaacataagagggtcatcattatctgccgcagtaactccaaaccagccgcttgattcttctgctattgtaaaacagccatcgccacgtttagcaatatatttgttcatagtcttaagaaattcgattgcgtcaagattctcattgccgccatacatgttaggtgtccatgtacccggctgcttaccgtaatcgaggtaaagcattgaagcaacaccgtcaattctgataccgtcaatatggtaatcattaagccacattaatacgcttgataaaagaaaacttcttacagcacctttcttatagtcaaatgtgacaacatcccactcaggatgcttctctagtgatggcttaagatatccgtaagcatctgccccgtcaaaatcatacaatcccttaacttctgtaccaaagtaagcaccattccagtcaattattacgccaattccagcgttatggcagtcatcaaccagctttttaaatgcatcactgccgcctattcggtgtgttaccgtaaaatatcccaatgtcgaatatccattcatctcctcattaagatactctgcaaccggaaggaaacatacatgtgtatatccctcctgctttacaaaatccacaagctcatctgcacttttttctttcagccagtcagtaagtgacacctcatatactgttacaggcttcttctttcctgcttctttctttctctttatcatccatagcccatcgttccatgcatatgaatcaggcatgttctcatcacttaccactgatgcagtaattggaactgatgatatctgtcttgatacagggtctaactttcttgtagttcccttaccctgtctcttaatttcatacatatatccgcatccggctgccagtcccggaataaacagttcaaatactcctgtatcctcaattctttccattaagtggactctgccgtcgtatttgttaaactctccaacaacacttacgctgagtgccttaggtgcccatacattaaaaagcactcccttcacgccattgacagttctttcatgagcgccgaatatatgtgctgcatttttctcttctcctgcaagaaatgctttgtaatcttccggtttcgtaacatttgcaaatgcatatgggtccgtatattctgtgacctctccattaaccttctccactgaataagtatatgaaagctttttcttagatgaaacaagtgctgcaaagaatccggattcatcaaccttttccatattaacagcagtttttctgccatctatatgcagcttaactgccactgcatcaggacgcattatctgtataagcagtcccttaccggtaacatgtgccccaagcaactcctttggcttgtcacactctgcatatacaatcccctctatctccggccagttcatcagaccgtataagtttttattcatacattacccccatccactgtttaaagcattccgtccatgatgacacctgtggttcataatgtcccatattcttagtcgcagtctctcgtgtgccaagtccaagaccatgagtacctttagcatatacatgataatcaaacggaatctcctgttttcttaacgcctctaccataagtaatgaattttcaagcggaactgtcttatcttcacatgtatgccatatgaatgcaggtggtgtgtccttatccactctcttttctatagacacttcatctataaactcatcatatttttccccaagacttctctcaaatgatgccctgtgtgcatcaattcctgatgtaattacaggataacctaacagcatgccatcaggcttaacatactcatgactgcagtgaagtacattttccagaagataatcaagtctttttgaattccatccggttccaagaagtccggcaacatgacctcctgctgaaaaccctgcgataatgattttgtcaggatcaacatcccattctgctgcattatctcttacatacttcattgtataggctgcctcaaaaagctgtgcaggatacgtaacaggtgcaagactgtatcttaatacaacagcattataccccatatcaagcatcttaatagctatagattctccttctcttggagaatgatgattatatccgccacccggacagataacaataagaggtctcctaaacggatcctgatcattaggaaatacatctttgatgtaagtagtaattgttgcatttccctgttgttctattccaaactcctgatatggtaaatctatattaatagtattatgtaacataatgttctccttccagctgaataattctgtgtattatgtctgtagtgtagtggtggtgatgtgtgtatattttcgtgcgtggtctcatgattcctgcgcttagtgggagtaaatgccgttatctgcaaagttttttactgtgaacgaaagcaaacgcgcttcgcttgaacgagctttcattcacagcgcttatgcatctaacggcattaactcccacacagctcgtcataaatcgaccacacacgaaaatatacacacatcacatctacacttctacaaaaagcagattaatatccacttagaatctatgtatgaataatccgcttcttaattttggctcaaaccaagttgacttaggaggcattaatagtcctgcgtctgctactgcgaataattcgcctattgatgttgcatacattgagaatgccaatacacaatcttctgagcatcttctctcaagctcgcctaaaccgcggattccgcctacgaagtctattctcttatctatcttagggtcgtggattcctaagagtggctctaagacgttgttctggagtactgctacatctaagccgtctaccgggtcgctgcttaagatttcttctttggctgtgagtgtgtaccattttttgccaagatacattccgaattcacctttcttagaaggtgcaacctgtgtgctgctctcgcttacagtgaatttatctttaatctttgccatgaactcttcttcacttaaaccattcaggtcctttacaactctgttatatggcattatcataagttcttcgtctgggaataatactgacaggaaataattgaactcttctttgcctgtatatcccggattagcttctcttctgcgtaaacctacctttacagcagaagctgccctgtggtgtccgtccgcaatatatatctggttaattcctgcaaatgcgttctctatagcctctacagattctttactgcttattttccagacctgatgtcttattccatcaaccgctgtaaaactgtatacaggcttctcctgcttggctttggcaacctctgcacttattactgcattagctctgtatgccaggaatataggaccagtctgggcactgcaggtatcaacatggttaattctgtctaattctttgtcagctcttgtgttctcatgcttcttaataacattgttaagataatcatcaatagaagcacatgctacaattcctgtctgtgttcttccatccattgtaagctcatacacataatatgccttgtccttatctgttataaatgttccatcatctatagcttccaaaagcatatcatgggctttcttatatacctgctcactatacatatcaaccgattcatcaaactgggtctctgccctgtcaatcttaagaaatgataatggttctctttccacctctgctcttgcttcctttgaatcatacacatcataaggaagagctgctactctgtctgccactttctcagccggtctgacacattcaaatggtcttattactgccatactaacctccatccgcactatttaacttaagtaatatactttcatatattagatacattttaacattcagacaaccttaatacaagaaagaccagccaaatgttacaacaaatgactggtctttgatattattctcattacatatgattacttaataactcttaccttgataacaccttcaattgctgaaagttcttcaactactgcctctggtgcagatgcttcaatatctaagagagaatatgcataatcgcctcttgactggttagccatagatgcgatattgattcctgctgcaccaagaactgttgttatcttactgataaccgctggtacgttcttatggcatacagtaattcttccctctgttgcgcatacgccgcaatcacagttaggataattaactgaattaatgatattaccattctcaataaagtttctaagctcattaaccgccataacagcacagttatcttcagcttctgctgttgaagctccaagatgtggaagaacgattgcaccttccatcttagctgttgttgggttagggaaatctgaaacataagtcttaactcttccagacttaagtgcctcaccgatagcagcttcatcaacaagtacatctcttgcacagttgataattactgttccatcctgcataaggtcaaatgcttccttattaatcattcccttagtgctgtcaagtgcaggaacatgaactgtaatatagttacattccttatagatatccttaacatcagatatgtacttaacttcacttgaaagattccatgcagccttaactgaaacatatgggtcatatccgtatacttccattccaagtgctatagctgcattggcaactaactgtccaattgctccaagaccgataacaccaagcttcttgcccttgatttcctgtcctgcaaatgctttcttagccttctcagttgccttggcaatatcagggtcttctgcattatctgcaacccacttgttaccaccgattaaatctcttgatgctaaaagcatagctgcaataacctgttccttaactgcgttagcattagctcctggtgtgttgaatacaacaataccttcctctgcacatttgtcaagaggaatattattaacgccagctcctgctcttgcaattgcaagaagattatcactaagctccatatcatgcatcttggcacttcttacaagtacagcctgcgcatcttcaaatgagctttctgtattatactcatcagaaaaaagcttcaaaccacatgccgctatattattaagacaattaacattaatcattatgcattctccttctcgaacttcttcatgaattcaacaagcttctctacaccttcgattggcatagcattgtagatagatgctctcataccgccaactgttctgtgtcccttaaggttaacaaatcctgcagctgcagcttccttaatgaacttagcttccatagcatccttagcttctttatcttcaatgttgcatacaaaaggtacattcataagtgaacggtcttccttaacaactgttcccatgaataacttgctctcatcaaggaaatcataaagaatcttagccttcttctcattatgttccttcattgctgaaagtccacccatcttcttaatccacttgaacaccttgccacagatatagatattgtagcatggtggtgtattataaagagaatctgcatctgcctgtgtcttccacttaagcattgtaggagttcctggaagaacgtcatctgttataaggtcttctctgataatagcaattacaacgcctgctggtccgatgttcttctggacaccgccgtatacaacgccgtacttagttacatccataggttctgataagaagcatgatgaaacatctgatacaagaatatgacccttagtgttaggtaatgtcttatactttgttccgtaaattgtgttgttctcacagatatatacatagtcaagatcctctggaatatcaagatctgagcagtctggaatatatgaaaatgtcttgtctgctgatgaagcaagctcaacagcctctccatatatcttagcttctgcaaatgctttcttagcccactgtcctgtaaggatataacctgctttcttattcttcataaggttcataggcacttcagcgaagaactgcgatgcaccaccctgtaaaaataacaccttatagttatctgggatgttaagaaggtctcttaaatccttctctgcctctttgatgatgttgtcataaaccttggatctgtggctcatttccattaccgactgaccgcttccctggtaatctaacatttcatctgctgcttctttgagtacttcctctggtaaaacagctggaccagcgctaaagttataaactctactcaccttttcttcctcctaaaatataaaatattaagaactattttagtcctttatcacattaaagtcaatatatgaattatttcttgttattaaggtcttctctgtcgaatgcctctgagattgcagcccccggtgaaaccatagggaataccttgtcttctctgtcaatatgacaatcaataacacatggaatattgagttcgattgcttctttaaatgctttctcaaactcctctattgtatcaacactgtaagccttggctcccagtccttctgaaaccttaacaaaatccacctgatcatcaagaactgtagctgaatatctcttgccatagaaaagatcctgccactgtctaaccataccaagtacatggttattaaatataacttcaataataggaatgttatatctggttgctgttgcaacttcattcatattcatacggaagcagccatcacctgcaatattaacaactgtcttatccttacgtccaaccttggcacctatacatgcaccaagaccatatcccatagttccaagtccgcctgatgtaagaagtgttcttggctctttgaacttataatgctgtgcagcccacatctgatgctgtccaacatctgttgtaataattgcatcaccatttgtaatctcgtatatcttctccatgataagaggtccgttaagaatatctctgttatatctcataggataatcaagcttataagacttgatgtgttccatccagtctgagtgatcctgattatctaacttatcattgattctcttaagaatctctttagcatctcctagtacatgtgcatctgtcctgacattcttgttaatctcagctgcatcaacatcaaactgcagaatctttgcattcttagcaaatttcttagtatttccagtaacacggtctgagaatcttgcaccaaccacgataagaagatcacactctgaaactccgtagttagatgtcttagtaccatgcataccaagcattcctgtgtatctttcattagatccgtcaaatgcacccttacccataagtgaatcacataccggtgcatcaaccttctcaacaaacttcttaagttcatcagatgcctctgatataacagctccgccaccaacgaatacatatggcttcttagctttcttaataagtgtcacagccttatcaatatcttcttccttaatgcttgctgtaattctgtctacaggctttggaactcttggtgtgtactcacactctgctgctgttacatccttagtaacatcaactaataccggacccggtcttccttccttggcaattctgaaagcatttcttaatgtcttggcaaggtcctttacattcttaacaatatagctgtgctttgtaattggcattgtaacacccgctatatcaatctcctgaaagctgtctcttccaagaagaggaactgttacattacatgtaattgcaaccataggaactgaatccatatatgcagttgcaatacctgttacaaggttagtcgctcctggacctgatgttgcaaaacatacaccaaccttacctgttgccctagcatatccatcagcagcgtgcgatgcaccctgctcatgtgatgtaagaatatgagttatctcatctgaatgcttataaagagcatcatatacattaagaatagctccaccagggtatccaaatattgtatcaacgccctgttctttcaagcattcaacaattatctctgaaccatttaacttcatttatcttctcctgatttctctttaatgtctttttataattatattaaatattactcatctgctgaacttttaagaatagctcctctgtttcctgatgtaacgagtgaagcatatctctttaagtatcctgttgttaccttaggttctcttggctgccacttagcctttcttgcagcaagctcttcatctgaaaccttaagttcaagtttaagtcccggaatatcaatgctgatgatatctccttcttcaactaaagcaataggtccgccaacagcagcctctggtgatacatgaccaatagaagctccacggcttgcacctgagaatcgtccatctgtaataagagcaactgatgagccaagtcccatacctgcaatagctgatgtaggattaagcatttctctcataccaggaccacccttaggaccttcgtaacggataacaactacatcaccttcaactatcttaccaccctttatagcagcaattgcatcttcttctgaatcaaatactcttgccggaccttcgtgtacaagcatctctgaaacaactgctgaacgcttgactactgatccgtctggtgcaagatttcctgaaagaactgcaagaccacctgtcttactgtatgcattatcaactgttcttatgacttcaggattacggttgtatgctgttgctatacactctccgattgtctttcctgaaactgtcatgcagtctgtattaagaagtccgatatctgcaagctctttcataactgcatatacaccgcctgcttcattaaggtcttccatgtatgttggacctgctggtgcaaggtggcagagattaggagtcttttcgcttattgggttagcgaatttgatatcgaaatcaaatcctatctcatgtgcaatagctggaaggtgaagcatggaattagtagaacatccaagtgccatatctactgtaagggcattcataatagaatccttagttatgatatctcttgctgtgattcccttattaaccatatccataacagccatgcctgcgtgctttgcaagcttgattctctctgaatatacggctggaattgtaccattgccgcgaagtcccataccaagtgcctctgtaaggcagttcattgaattggctgtgtacatgcctgaacatgaaccacatgttgggcataccttttcctcaaactcaagtacatcttcctctgtcattgttcctgctgcatatgaaccaacagcctcaaacattgaagaaaggcttctcttcttccccttaacatgacctgcaagcattggtccgcctgatacgaatacagttggaagattaagtctcgctgctgccattaaaagtccgggaacattcttatcacagttaggaaccatcacaagtccgtcaaactgatgtgcaattgccatacactctgttgaatctgcaattaaatctcttgttactaaagaatatttcattccgacatgtcccattgcaataccatcgcatactgcaatagcagggaatactacaggcacaccgcctgcctcagcaactcctaatttaactgcattgacaatcttatcaatattcatatgacctggtacaatctcattataagagcttacaataccaatcataggtttcttcatctcttctgctgtgaagccaagtgcattaaaaaggcttcgtgcaggtgcctgctgcataccacttctggcgttatcacttatcatagcttatctccttaatatgtattatttaaatgtattaaactctctctgcgattaagtcgcccatcttgtcagttcctacaagtgtgcatccttctgacataatatcagttgttctgtagccttcctttaaaacagctgcaactgctgcttcaatagcatctgcttccttgtcaagatcaagtgaatatcttaacatcatggctgcactgagaattgtagcaattggattagcaacattctttcctgcaatatcaggtgctgaaccatggcttggctcataaagacctaacttagtcttattaaggcttgcacttgataacattccgattgaacctgttatcatacttgcctcatctgataatatgtctccaaacatgttctcagtaagaataacatcgaactgtccaggattcataacaagctgcatagcacagttatctacaagcatgtctgaaacttcaacttccggataatcctttgcaacctcatgtacaatctttctccagagtcttgaagaatcaagaacatttgccttatcaacgcttgttactttctttcttctcttcattgcaatctcaaatcccttaattgcaattcttctgatttcttcttcgttgtatgtaagtgtatcaacggctgtctccaatccgtcaatttccttagtatatctattaccaaagtaaaggccgcctgtaagctctctcataatgaccatatcaaatccatcaccgattatttcttccttcaatggacacgctgccttaagttcatcataaagatatgccggacgtaaattagcaaaaagtcctaattccttacgaatctttaaaagtcccgcttctggtcttaaattaggtgcaacatcataccacttggaattacccacattgcctccaactgctccaagaagtacagcatcagatgctttagctgttgctactgcttcatctgtaagtggaacgccatactcatcaattgagcatccacccataagaatcttggtataatcgaacttgtgaccgtatttgtcagccacactgtcaagcactttcacagcctctctgacgatttctggtcctattccatcacctggaattaaagttattctgctttccataaacccttacccctttttcatatgataattcaatttaatatgatataacatttgcacaacattttcaataaaaaaaggattcctgaccagacaaatgtgtctgacccggaaccctgctttaattaattgcctttaattattctgctgatgtgctgtctgatggcttctcaacctgagcaattgccttcttctgcattgagatacggcaattcttgttgttaccgaattctacgattacatcatcttctgatatatcgataagaacaccatagaaaccgcttgttgtaagaacataatcaccgatttccatagaatccataagttcctgctgacgcttctgttccttcttctgtggcttgattgccatgaaatacatcattgcaccaataattacgacataaaaaactatgatagcaatattcattgatactcctccttaaaaatgtctctttcaaacttaacatataatacataattgagagctgcttgtctacctcaaaatgtatttttaacaaaatatttataaacatacagcattactgcttatcatatgtcttcatctgatataatgcctcttccttgaagcctgcatatcttccttcttcaatcgctgctcttatgtctgtcatgagatggttgtaatagtaaagattatgaagaacacaaagacgcattccaagcatttccttagccttaagaagatgccttacatatgctcttgaataattctgacagcatggacatccacagccttcttcaattggtgctgtatctgtttcatactttgcattaaaaagattaatctttccaaacttagtatacacatgtccatggcgaccgtttcttgaaggatatacacagtcgaagaaatcaattcctctgtccactgcctctaatatattggcaggtgttcccactcccataagatatgtcggcttgtcctttggaagatatggcactacattatcaagtacatcatacatttcctcatgtgtttcaccaacagcaagcccgcctactgcataaccatcaagatctaactctgatattctcttggcgtggtcaattcttatatcattaaatacgccaccctgatctataccaaaaagcatctgatcaggattaaccgtatcaggaagtgagttcagtcttgccatctctttcttgcaacgctctaaccagcggtatgttctgtcaacagaattctggatatactttctgtcagcctttgccggcgcacattcgtcaaatgccattgcgattgttgaaccaagattagactgtatctgcatgctttcctctggtcccatgaatatcttatgtccgtcaatatgtgactggaaagtaacgccttcttctttaatcttacggagtcctgcaagtgaaaacacctgaaatccgcccgaatctgtaagaatcggtttattccagttcatgaacttatgaagtcctccaagctgcttaataatcttatctcccggtcttacatgaagatggtaagtgttagataattctatctgcgttcctatctgctgtaaatcagttgtcgcaactgcgcctttaatggccgcaactgttccgacattcataaatacaggtgtctgcacagttccatgtactgttgtgaactctgctctttttgccctgccatctgtctttaatactttatacatatctgctccttttattttctgtaaaactctttaactctgtccattctagccgtcatattgtcaaatatcaggtcaacaagtgtaagtgctgtcatagcttcaaccacaacaactgctcttggaactatcatcggatcatgtcttcctttgattgaaacctcgatatcctcgccctgcttattaacagtttcctgcaatgcactaattgaaggtgtcggttttaccgctgccctgaacacaatctcatcaccgtcgcttattccgccaagcactccgccgctgtgattagtcagcttgccaaccctgccatccttcattacgaattcatcattattatactttcctgtaactttagccgcttcaaaaccgtctccaatctcaaagcctttgacagccccgattgacattattgccttggcaagattagcatctagcttttcaaatgtaggattgccaattccagtcatcattcctgtaaccctacattcaatgacaccaccgattgaatctccaactgacatcttgctctctgcaaaagccttaaccttctctgcagcttccttatcaggtatgttaaatgcgttattatctctttcagctatatcaaacttatcataatcaatgccaattccaccgatttctttagcatatgctgtaatattaattccaagctctttaagaatcttcatagcaattgcaccggctgcaactcttccgatagtttctcttccagaacttcttcctccgcctctgtaatccctgaatccgaatttctcgtcaaatgtataatcagcatgtcccggtctgtaataattagctatctctgaatagtcagcagacctctgtgtcttattatatactgcaagtgatattggagtcccggtagtcttgccttcaaatacacctgaaagaatatgtacctcatcatcttcctttcttggtgtagtaaactttgactgtcccggttttcttctgtctagctgctcctgaatatcttcctcacaaagaggcagacctgcaggacacccgtcaattacaactccaagtccctctccatgcgactctccccatgttgatatcttaaatatatttccaaacactgaacctgccataatatattctcctcatcttttcaataggatttattttaacatattaaaatatatatcatcaagcaaaaccccaatttattaattttttcttatttttatttttttcttaatagtcaaatgtattttatatggtaaaataaatatatcaatatattgaatggagtttattatgggaactgttataggaattgatttaggaacaactaacagctgtgtggctgttattgaaggtgatacgcctactgtcatcaccaacaaagaaggctaccgcacaaccccttctgttgtagcctttacgaaatcaaaggaacgtattgttggtgatgccgccaagagacaggctgccgtcaactctgacagaactatattctctatcaagagacacatgggtacggactatcgcaggaagattgacggaaagtattatactcctcaggaaatctctgcatttatacttatgaagttaaaggaggatgccgaggatttcttaggacagcctgtgacagacgctgttgtaactgtgcctgcctattttactgacgctcagagacaggctactaaagatgccggtaagattgccgggcttaacatattaagaattatcaacgagcctacttctgccgctctcgcgtacggacttgacaatggtatggcacagaaggttcttgtgtatgatttaggtggtggaacttttgatgtatctgttatcgatatcggtgataatgtcattgaagttcttgcaacttcaggtgacaatcacttaggtggtgatgatttcgatgaaagaatagttaattatcttgtcgagcagtttaagataagtgacggtatcaatctttcaaaggacgtctctgcaatgcagcgtttaagagaagaagctgagaaagcaaagaaggagctgtcttcttctgtgacaactaatattaatcttccttttatcgctatgtctaaggacggaccgcaccacattgatatcactttatcaagacagacatttaatgagcttactgctgaccttgtagacagaacaatcacccctgttgagaatgcactgcatgatgcaggtctttccaagacagacattaatatggttttattggttggtggttctacaagaatccctgctgttgctgataaagtaagacagcttatgggaaaagagccatcaagaaatcttaatcctgatgaatgtgtagcccttggtgctgccgttcagggtggcaagcttggaaaccagcttcaggccggttctgctgcttctgaaatcatacttatggatgtaactccaatgtctctttctattgagactatgggtggaattgcaagcaggcttattgaaaggaacactaccattcctacaagacacagccagatatttactactgccggcaatttccagacatccgttgatatcaaggtttttcagggtgaacgaaagtttacaagagacaataaactgcttggcaacttccgtcttaacggtattaagcgtgcgatggcaggagtcccacagattgaagtaacatttgacattgatgttaatggtattgtcaatgtatctgcaaaggacttaggtaccggaagggaacagagcattactattacttcaagctctaacatgaccgaagaagagattgcaaaagcccgctgggaagccgaagtctacagcaagcaggatgaagcataccagagatttattgatataagggaagatgctgtacggactcttaacgaggctaacaacgcacttgccgccaataaaaaggtctgggagaaggataagaaaaagaatgttaaggctcagattggacatcttggcaagcttatatctaaagctcctattgacaagcttaatgaggagaaagcagcttccatgcatgaggcttcggaagctgtgaaagaagctttaaggtagtgacgaaaaagaccagttcagatatttcccgaactggtcttttttatctactctgctttcttccccttcacattaactatacatattcctatgcacactaataccaacgctataagtgcatttattccaagctctctgcttccttctccaagccaccaggctgaaagaagtacaccgaatacagggttggtgaatccgaagattgccactttggataccgggttgtgctttaacagtattccccatattgagtaggctacggctgatatgcatgcgagatagaataacattagtattgctgatactgacacgtgtgtaattctaccgcccatcacaagtcctaatataatcattactattccaccgaatatgaactgataaccgctcaacattaccggattgtctttctttgaatagttcttcataagacatgatgaaaatgcatatgacaacgcacataagaacagacttccgtcacccataatgcttaagttcatgtcgattttctgtccattcatgctgactacgataacacctgcaaaaccaatcacacagcctataatcttcttcagattcagcttttcctgtctgaatataattgtcgatacaagtattacgaaaaatgtgttagaaccgttaattattgacgcctttactccgctgttgtgtgcaagtccgatatagaagaatatgtactgcagaattgtctggaacattgcaagctttacaatgcttggtacacttgatttcgttggaagcagcatttttctgttaagaatacttccaattaagattgtaagcactcctgcaaaaacaaatcttgttcctgcaaataatacctgtgtccatgtttcacttgacggtatcttaaacagcgcatatcctaatttgatacaaggcgatgcgcttccccaaaggaatgtacacacaagtgcaagggcgcacaccacccatgttttctgtaaaaaatcttttttctcgtttgttttttccatgattaatctcctgtttttctaatattattgctaattataatggcattcataatctgacaggttttctccctgacacctgccatttccatataatctgaaaatctttttgcaacatcttctatatacgatattattgcatcacatttcctcttgcttactcccatgtttattccacattttatcaaatcatcataacttatatctgaactttttccatttataagcatctgatgtgctttcaaccacatattgctgctgtcatatgcaaatgtgacatcatatgctggtgacaatctccagacaccattcttatccatcagaaaagaaacattttttacatgatcatcctgattaatcagaataacattaaaaaccattcttctataaaattgttccacatctgaatatggtatacctagtctattcatataatatgctgcctgttcataactgcataatcccggaatattgtaatctatatgtgaaattgctcctaatgtctgcatatgaatttttttattattgttcctatcgaaacgtttagttataaaatgtgcatatccggcatcttcaagcagacgacattcattcataattacccccgctgcttttgccataagataatatccgtattctattcttgtatattctactgaatcttccagattatgatccccatttttagatactccatcaaacttcataagccagtattcaaatccattaccagcattaatctgtccactttttatttctcccgtatcttcattccatgcaatcagcgcctttgctcttgcaccacctgcagatgttcccaatagcacaagctggctatatccagcattatctttcagattaatcagcttatcttttctatcagataatacatcagatgcaaactctaccattttcgatatattaacatcctctattgtactgtcaaacggacttgttgctggtatatattctaatgcacccatacctctttttcctgtatagcacagtctgtctataacattaaattcactaattgattttccctgctcagccagccatctgtctataattttattaccaaatttatctggaagcgaatccgctaccaatccaggtgctccatgaaatgctgtccttgcaagttccggaaattcatacactctttctgataatggcatatgtataggtgatacctcaatattactctttaaaaaatctttatcatattcaaatgcaacaactccatttgcttcattcatatgaattattccaattcttgtgccccaaagcattacctccgctgtatttatcattcatcttccccccatttaaatccagtatctgcttttctttttgcacatgctctctgccttgttttaacatttttcaaataagatgatggccggttgttcatatctggtatcacattcacgaaattattcataagctccatcgcattcattaatttcataaaattaacaagacttatatcttctccactttcaaaccgagtaatacttcttaatgaaacgcctgatttatccgaaagttctttctgtgttaatggataacttatcctatatgccttaaacctgataacaacttcctcataatcactaatcataattaaacatctccaaatccataaatcttatatatcatattcaaatgttttttgtattgtatcacatttgcaattaattagcaatatatggcgtgttaagctatattttaatgcttaatacgccatatattgctagttattttttattttgtgcggcagtcgtacccgaagaatttttcttttaaacatctggctgttaaaaggtatcaccggataaatgtagctttttcctgatattgtcctgttaaagcatacaagcactattgcaaatatgactcctgccagaagtccaattcttccaaagaactgcaccagaatcagattgactattcttatgaattttaatgcatatcccatctcaaaacttgcctgtgagtaagttccaaccgttacaactgccatataaagaagtgattctgaattaaaccacccggactccacagcatattctcccacaacaataccagcaagaatacttaatggcgttgacagcattccgggtgtattgaccgccgcaagcttaagtccgtcaactgcaagttcaagaataaaaagctgcaatataaccggaaccgttatatcctcacttatcgttatgaatttcaaccattcaggcacccactgcggattgctctcaagcaaaagccatacaggtgtaagaaaaaccgtaagcagtgtaaagaaaaatctcgaaagtcttatataagttcctatcattggcgaaaaattaaaatcatctgcttcttctattatatcaaatacatttgttggaataatcatcactgcaggtgatgtatctaccataataactatatttccatcaaaaagtgctgctgcagcggtatctggtctttctgaatatttatacttaggaaacggattaatccattttcccttaaacatacattccgcaaggctctctatattcatagtgagcgcctcaacctctatgctgcttatcagattctcaattctttcaagcagcttcttatcaaccttatcatcaatatagcacacagcaacatctgtcctggagcgttcccctacagtatacatttccattgaaaagcggctatcccttattcttcttcttaaaagtgccgcattgcacacaagtgtctcaacaaatccgtctcttgagccacgcagaaccttgtctttgtaaggctctgtaactgaacgcatcggataagtacgacagtcaatcagtatacattcgtcaaagccatctattatcatgacggtctgccctgaaagaaatgccttctccacctcatcgtaatgtccgtttttttcaatctctgtatacggcattccgacctctaagaatgtatctatatcctttatgtccgattctttcaatgaataaaagaactgcacaagtttttcaattgtttcctcctgtacgaatccatctataaagtaaaaatgtgttctcttaccacctattaatacatctctttgcagaatgtcaaaatttctgtccactcttaacttctcattcatcatgcggacattcatgtctatgttagttgtaaaatcagtcatgcttgctcctttcactggcacattttcacccgcactctgaatcagccaaaagcagctctcaatttcactaaccctgtcaaagcacgaaaagggcaggacttgcgccctgcccttatagaatgtccacatttgacacatttattctgttattagttctcaaaaagtgatgttgagtaatatctgtcaccactgtccggaagcagtgcaacgattgtcttaccttcgttctctgacttcttagcccactcgattgctgcgtaaagtactgcacctgccgatattccaaccagaattccctctgtgtgagagattaacttggcatattcaaatgcatcatcgttctcaactggaactacactgtcatatatcttagtgttaagaatttcaggaacaaatcctgcaccgattccctgaatcttatgtggtcccggcttgccctgtgaaagtaccggtgaagttgcaggctcaactgcaattatctcaatcttatcattcttagacttaagatactcgccaactcctgtgattgttccaccagttccgactccagcaacaaatgcgtctacctctccatctgtatcattccatatctctggtccggttgttcttctgtgtgcttccggattcgctggattaacaaactgtcctgctatcatgctgcctttaatctcattttttaattcttctgccttggcaattgcaccagtcattcccttataacccggagtaagtacaatctctgcaccatatgccttgataatatttcttctttcgacactcatagtctctggaagaactattattgttctgtagccctttgctgttgcaatggcagcaagtccgattcctgtattgcctgatgtaggctcaataattgttgcaccgggcttaagaatacctttcccctctgcatcttcaatcattgccttggcaactctgtccttaacgcttcctgttgcattaaaatactcaagcttaacaagtactcttgccttaagtccgaacttctcttcaatatgtccgacttctacaagtggtgtgttacctattaagtctgctgctgatttatatatttttcccatacaatcctcttttcttgtggtattgtcccacattttctaatatcaattcatgaatccaatcaataaatgttattattgaatatcattcataaatcagactgtatgtttatgcaatacacaaacatactatgtttatatgttattataaaacaaggattttgatttgtacagtacttttttatttttcttcaaaaaaggagtcttaaaactccttttttctcatcacactatagctgattatgtatgatatgaataataagataaccgtaaatattattcccaccagtataagcatagctatatttacattatccagaaatgcagagattttaataagtctatccattccaattatttttcttatacaataaaacacaacagccactgttccaataaatataatcagagctatcttgctcttttccacgccatattttatatgaaccggaattatacaggcaacaaaaagcagcaccacaataagggaaacaaacattacttctccttcccccgaaatacttatagtctgattctttacaatcataatcccaaaatatattataaatgcctcaacccatgatattattgttcctgcgataaaaaatatgtatttttcaagcacatacattttagcatcaataggaagcgtcattaaaaacctgtatccattatcatattcatcatatgatattgttccgacaataactattattgtaagcattggaatatacccaagaacaaattcaggactaacttgactatacccaataaaaactgccagaagaacgaaaataatgaataccttttttctctgcataatgattcttaaatctttctcaaataatcccgacattatctatcccctcctgccatcataagaataagttcatctatgccaccgttctcaacagttatatcaggataattttccttataaaatgctttgctgctgacaaaacatgcataaccgtaacattccttcttagtctttaatatataattcttatcaagcttttcatattgttcttctttaaccttaactattccatactgttccactattatatcagtatcctcatgtaatattattcttccatcattaatcagataaacatcatcacacagattctcaatatctgaggaaatgtgtgaagtaattattattgacctgttttcatcttccgccatatactcacgaagtatgtcaagcacatcattgcgtgcctggacatcaagtcctgccgtgggttcatctaaaattaacagttctgcattatgtgttatcgaaataagtatctttaatctcactttcattccagatgaaaattctgcaatcttcttattcatcggaaatctgtattctagacatttcctctcaaaaaaatctttgttaaaccttggatacattttagcaagaatatgttctatatcattcacactaagttgtgaacaaaatcctgaatcatccaacaatacccctattcttttcttatcttcggcagaaagttttcctgcttcaactccgaatgttttaacacatccactatcagggttgacaagccctaatataaggctgatagcagtactcttcccagcaccattctttcctatcagaccggttatcattccttgctgtatattcattgattgtatatcaaatatataatccccatatctctttttaacattttcaaatgttatcatttaatcatcacctatcagcagattaacaattccaattatttcctgattgtcaagtcccatagaccttgccctgtcaatcactttcataaaatcgtcctccactgcctttcttcttgcttcgagtgccagctgtttatctgtagctgttacatatgttcctttgccatgaaccgttgttacaaatccggcatcttcaagtgcatcatacgccttttttactgtaagcgcgcttatgcgaagttcccctgcaagcgtccttacagaaggaagtgcttcattttcctttaacttattttcaaatatttctgacttaatctgctccatgagctgttcataaatcggaaccattgaagaatgattcaaaataatacgcatatcatttgtctcctttacaataaacagtatataacagttatccttgtgttgtcaactgttatatactgttcattcattctgtaacatctaatattaaaaaacgcagctaccactccataatgataactgcatctgtaataattacttattctgttcttctagcaacttctttaatctttctatctcagcatcttttgcttcaattgcagcatctttttccttaaaggatgctttaagagcctcattctgtgcttcaagttctcctttccgtgcttcaagttctccattctgcgcttcaagcttacctttctgtaccttcagctcatccatctcatccttcatcctgtcaaccatcagctctgctgtattcctgtctaatatcctcaacgcctcagaaaacatactgagcacctcctttggtctctccaaatactcattaatatcaaggcgtactgattcatcattcactggtttttcgtcggctctgcatctgacagcttccaccagtccgtcatatgtgtgcttttctgcctcaactatacgttttttcacaattccagcttccataagcttcttactgcaagccgggccaatgctgtacaccaaaacatcatcaagtctgtcaatcagccattttatacgctccccgctgctgccacttgtaacaattatcccatcaatatctccgcaatccatgctgtcatattccataccatcataatccacaggttcattcctatatacttgaatcttaattaagttttcatactccttcatagcttcctcaagtgaaccgcttgtgacttcagcacacagatacacaactctgcctgacacagcattcatcagttcttctcccagcgctaatcctgtagcttttgacgaaacataatctgcctcaatcccacatgctgtccttaaagcattctgcgtattcttcccaacaacagcaaccttaactcctgcaggtaccacgtttcctgcattataagcaaacccagccacagcatttttacttgtaaacacaagccactgtgcatcttttatctgtgtctcaaaatctttaacctttatgtattcaatcctgccagttactatttttttgcagaaaaacccctcccttgcaagtaattctgcaagggaagggctttcttcgtacatctgttcattttcaatatatgtatatatgtatttacccacaatctactccaatcctagcatacgggctgcttcgtgaccaaccgcctcactgtcagttcctgtaacttcaattctaagaatcctactgcaatcatcattgccaaataacacaaccattcgaaggtcaccattttccttggttacacaatgtgcgccaaccggggcatgacaaccgccacctgttaatcttaaaaatgttctttcagccacagcttctctatcagaattatcatctgacaaagcatttatcttatcaagaagttctgtattcacctctgcagcctcaatcgcaagaactccctgtgccggtgcgggaataacaacctccgggtcaaggtactctgttatctcaggtgacctgccaagtctgttaagccctgctgccgcaagcacaattccgtcaagtccgtatgaatcgtccctaagtttgttaattcttgtatcaacatttcccctgatagcagtaaaccggatatcaggacgcagcattgcaagctggcatgcacgcctgaggcttccagtacctataaccgcaccggaaggaagttctgaaaaacttcctgcagtctttaatataagtacatctctgcaatcctctcgtttccacgcctttgcaaatgtaagtccagtcgcacattcagccggcatatccttcatgctgtgaaccgccatatcaatgctgcctgaaagaagctcttcctcaatctctctgacaaaaagccccttagttccaatcgcagcaagcggcttatccgtaaccttgtcgcctgttgttttaattataacaagttcaaatgtatcctcaggatacgcctcttccattcttctcttaacatattctgactggacaagtgccagctttgaacctctcgtacctattctgtaatgcataatcctccctacaagccaaacagtctctcaaccatatccttatactgctgctgttcattttcttccacatttttcaattcttcaatcggttcttttaacaatctgtgtagtgacgacttaagaatcttctttaagattaccctgtcatggtcagaaaggtcaatcttgcggttaagataatcatagctgtcctgtactatctcatcacattttttgccaagcgactggatagttgtatccattctgcttgatgtgagccatttcctggtttccgctatatactcatcaatcacgcaccagctttccttaagcaaatgtgccctctcattctgattagactttacaatcccgcctattctgtcaagatcaataagagtaactccacaaatgtcccctgctgatttttctatatctcttggagcagcaaggtcaagaagtgtcatccttttacagcctgataattcagaagctttaatcaccagatgaggtgatgaagtcgctgagacaactatattactttctttaagtacttctgttttcttatcatatgtcacaacctcaatctgcggaaactccttaagcaactccttcgcatgctggtaagttctcgaacatacagtaacctctgcgccatattctgccagataccttatggcaagtgttgctgttttgccgcttcctataacaagcgcatgctttcctgatatgccgcatactctgtctaactcctgaatcccgacatagcatacagataccggtttttcacttaccttgtactctgtcttaatctgctttgcacagcttaccgcttctcttactatataattaagctctttcctgctatgtccaagcgttcttgaaaggtctgccgcatcctttaactgacctagtatctgatcctctccaagcaccatgctttcaagtccggcggctatacaaaacagatataccagtgcttcttcaccacatttgacaccggctaatttagtatcagtaagtccaaaataatcattgaataaatcggacatcacttgtacaaatgtttcatcctcatacagataaaacacttcgcatctgttacatgttgaaaggcacatgcactggttcacgccagcttcctctgcctgttgcataaagtctgctatgccgctgtctgtaaatgtaattttatcccttactgaaaggtctgaattcttgtaattaattcctacatatcctaactgcatctgtattcccacttattatccgaattattttctgaagaattcttccataacctctattgtacggttgatgtcttcattagtgtgtgcatctgatacgaacattgcctcaaactgtgatggtgcaatgtatattccgttatcaagcatatgtccaaagtattctgcatacttcttagtgtctgactttactgcactgtcataatcttctactgcatctggtgtaaagaatatgctcataagtgaaccaatctgattaaccgatacccttccagctccacattttcttacactgtcagcaatacgctttgtcttagtctcaagtctgtcgtatatatccttattatctcttaagattcttaaagtctctaagcctgctgctgttgcaattggattgcctgacaatgttcctgcctgatatacaggaccgtcaggacttatcatacgcataatgtcagctcgtccgccatatgcgccgactggcatacccccacctacaatttttccaagagttgtaaggtctggctttatgttaaagtactcctgcgctccgccaattgaaagtctgaagcctgttattacctcatcaaatataagaaggcttccattctccttagttatgtctcttaagaattcaagaaatccatgtcttggaagcacaactcccatgttagctgcaactggttcaactattaccgcagctatttcatctttattgttatcaaaaagctccttcacagaatcgcagtcattgtattctgctacaagtgtattcttagtgtaatcagcaggaactcctgcactgtctggaactgatgttgtaagtgctgctgaaccggcttttactaaaagtccgtcagaatgtccatgataacagcctctgaacttaattatcttgtctcttccggtgtagcctcttgccacacggattgcactcataacagcttctgttcctgagcttacaagacggctcacctccattgtaggaataagctcatatataagctctgccatctcaacttctctcttggttggcgcaccatatgtaaggcctgcttccgcagcttccttaacctttgcaattactctgtcatgtgcatggcctaatattcccggtccccatgaacatatgtagtcaatcatttcattcccatctacatcagtaattctgtctcccttggcagaagctatgaatcttggcactctgtcaactgccttgtatgccctgacaggactgtttacaccacccggcatatgttttactgctctctcatataaatcctttgacatctcttcattcataaaaccagctcctcctgcttaatttaatactgctaaaaatgttactcttcctttaaccattttgccacatctatagcatgatatgttattatcatcttagctccggctctcttaaagccagtcatattctccattacaatcttcttctcatcaatccagccattcattgctgctgccttaaccatcgcatactcaccgcttacattgtaagcgacaattggaatattgaagttaagcgctatctctttcataacgtccatatatccgagtgccggctttgcaataatcatgtctgcaccttctaatatgtcttcttcaacttcccttaacgcttcttttccattagccgggtccatctgatatgtctttctgtcaccaaatcccggtgctgaatgtgcggcatccctgaacggtccgtaatatcctgatgcaaatttagcactgtatgaacatataggaatattaaccagtcctgcctcatcaagtgcatttctgattgcctcaactctcttatccatcatgtcactcggtgcaattatatctgcccccgcttttgcataagcaactgacgcctttgcaagaagcggcagtgtctcatcatttaatataacgccatcttttacaagtccgcagtgtccatgtgatgtgtactcacacaggcacacatcagccatgataacaagctctggataagcatccttaataaggcggattgccctgcacacaacaccttcctcgtcatatgcctcacttccgacctcatctttatgtacaggtattccaaaaagcagaattcccttaattccaacctctacagcacgtccgatttcttcaagaacatggtcaagcgaatactgacatattcccggcattgatggtacttcctgtattacatcgttctcctccgtaacaaatacagggtatataagctcgtccacccttacatgattctctcttaccatatctcttaatgtcgcattcattcttaatcttcttgttctgtccatgattatcatcttccttccaacgtttcctatataatagcattgcatataaacattgtaaactggtatgttatgttctactatgtatcttaaccattcttgcatactcaccatcaagcttcataagctcctcgtgagttcctctctccttgatgccctcgtcagtaagcatcaggatttcctccgcattttcaatagttgtaagtctgtgtgctattacaaatgtggttctgttcttagccagcttctcaagtgattcctgtacaatctgctcactctcattatcaagtgctgatgtcgcctcatcaaatataagaattggcggattctttaagaatactcttgcaattgacagtctctgcttctgaccgcctgacaatttgactccgcgctgtccgatatctgtgtcatatccgttctcaaagctcatgataaaatcatgcgcatttgcaagctttgccgcctgaattacttcttcgtctgtagcatctggctttccatatcttatattctctttaattgtacccataaacagatacacatcctgctgtacaactccgatatggtcacgcaagcttttaagtgtaacatctttgatatctgttccatcaatcttaatcgaaccgcccgtcacctcataaaatcttggaataagcgagcagagtgttgtctttcctactcccgaaggacctgcaagtgcaacatattctcccggtcttactgacagattaaccccggaaagcacctcgtccacgccgtccttatatctgaaggacacattttcaaatgttattgcacccttcacatcagtaagttcctttgcgtcaggcttatcagctatttccggctctactgaaagaatctctaagaatctttcgtaacccgaatagccattctggaactgctctgtgaaatcaataagcaccttaactggctccgtaaaaatatttatatacagtaaaaatgtaacgaaatccgtaatatttacccagccctttgcaattccaataccgcctgctgcgattacgattacatttatcattgttgtaaatgcagtaagtcccgcattgtacattcccatataatgatagctgtctctcttagattcaaggaataaatcattgcctttcttaaatttctcacattcaatatcttcatttgcaaatgacttgacaacccttattccagacagattgtcctctatctgtgcatttatctcacctattcttaccctgtttctcttaaatgccctcttcatgcgcttgttaagcacatacgcgaatacaagcatgaacggaatcagcacaaatgcggcaatcgtaagtcttaagtcaatcgaacttaatatgcataatgcaccaattatcttaatcagtgaaatagttatattctcaggtccatgatgcaaaagctctgtaatatcgaacaaatccgatgttattcttgacaataactgtccaaccttctggtcatcatagaatgaatatgacagcttctgataatgattgaatatctctgccctcatatcgtactcaatctttgcgcccattacatgtccataattagatatatagtagttgcaaccccactgtatcagtacaagcacaaaaagtactccaacaataatcataattcttgaaagtgcttcattggcactcatatatgcaccctttgatgtaatgaaccttacaacaagtggtatcacaagtgccaccgccgctgacatcatcgccagtatcatatcaagtataaatgtgcctaaatacggcttgtagtatttagccaacttcttaagattctctttcataaacttctcctgttttctatatttcctcgtttcgccgtgcatgtcagggcaagcacaccactgcttgcctgctgcttgcaccccggctgtccgccgtgcatgtcagggcaagcttcgcttcccctgactgtcgggctttcgccctatcgtatgcatcatgcattccgtgctttgtgccagcacagcactgcttgcctgctgcatacggcacggctcaatgctaacgcacattataccacatccttacttattgaaaaagcaaagaaatgtgagtggacctgctaatttttaatcttctggcttcacttttgacaattttttcaatgtttaaaaaaatataaacctactaaaagtcgtcaacttcatcatttcgtaggttcattagcttgtcattttgttgttatagttgcttgctgacctactatttacctgctttgtcgctttttcgtaggtctttttcttgcttcttgcttgattatgagtgccctatgctggcaaaaaacctattaaatactttaacattgcttttttcgtaggtctttcagtcctcaacttgccataactcctgcaaaacaacctactcaaaccacaatctatgtagttttagtatgtcttactcatgtcaattgctttgcatgactgttattattgagtgctggtttattggcaattctgattttggacttctttgcgtccccactccgcttcaacgtccaatccgccacactatgaccactccagctaacaaataaataagtccgtgatgcattttataataaaaaaacacatcccggacatttattaacattttattcacttacaagctctgtattctgcgtttcaatgctcttgccagcaccgttaatcgtcagatataaaagccctattccaataaatataagcagcagaaccacaatcatatatacaacacctattcctagcgactctgaacccatctggcttaaatcccatccaaaccagcctgttggcacattataattaagaaagttgtatggtgccgtcattgtgtcataccacctaaccccaagtactgcaagtatgtatacaaaacccacatagcaaagcggtggtataaccgcgtatattgcatatatctttcttgctttaaatcctttatcaaatataagaaaatctgctattgcaaatactggtccaatcagatgtacgccaaggcttcctgcgtgattatgaagataagcaccaataagaccatcatctgacgtaggtccaagaataatcatatacaccagacatgtcagtgtaattgagagcgtcataagaaacttgagcatatataatctattattcttataatcttttcccgtaacaagcaatatcatgtccaacacaataaataccaccagcacaatatcaagtgccacattagaaagtgttgtaaaaaatgtgaatgacataatgctgtcaattgtaaacatgagtccatacaccgaagcaatcagtgatactgccttaaaaataatacttgtaatcaatcttttcctgtctaatatcttgttatccaatttgagcctccaattatttgattctcgaattataatatatattagtttgattatcaagttatttatacaaaatatctatgtattcaatcagcctgttatacgaatcttcgtctgtcttatattccgctccattccattctaccctgcctgcaagcacaatattattggctattccatctttataataagttattctataactccagccattagtacgtggaaacttttttgcggtaagattcatgtttttaaccagttcaataatctgtgtcctctgttcctcatctggtgttatctctttaccattacctccgcacattattgtcatcttatcatatccactaaggtcaatattgaccacctgttttgaagtactgattattacatatgcaccaattcccgcaaatgctaataataaaacaattcctgctattattttaatattttttcttttcatacgcccctccttttggactttttccatgtcactctccgctttccctttctatttatatatacgaaacactttccagaatagtttgcacatttacatacatattttatatatcaatacttaattccactcacaaaaagaaaaaactcccgcagggacaagccctgcgggagcaatcatacactttattcaagctgtatattaaattacttgtaaagttcaactaacttctgaaggtgctcatatctttccttagcaacttcctcagacttagcgaagagtctctcagctctttctgggaatggcttaacaagtcttgtataacgagcctcgttattaaggaattcctgatatgatccatcaccttccttagatgtaagtgtgaatggattctttccttcagccttaagtgctgggttgaatgagaagaggttccagtaaccagccttaacagccttcttcatctcatcctggcagtggttcataccacccttagcgataccgtgaagttcgcaaggagcgtaaccaatgataagtgatggtccgttgtaagcctctgcttccttgattaccttaagagcctgagccatgttagcaccaagagcaatctgagctacatatacataaccatactgcatagcgatttcagaaaggctcttctttccgatttccttacctgctgcagcgaactggcaaacctcaccgatgttagaagccttagaagcctgtccacctgtgttagaatacatttctgtatcgaataccataacgttaacgttctcaccagaagcaagtacgtggtctaatccgccgtaaccgatatcgtaagcccatccatcaccaccgaagatccatacagacttcttagcaaggtaatccttcttagctaatacctgtggagctgttggacaaccatctgcagctgccttctctaactctgcaacaagagcttctgtagctggtgtgttagccttagtatcatccttagtctcgatgtacttagctgctgctgccttgaactcagcagatgccttatcagatgcagccatctcttcaatcatctcgatagcctgctctctgatgtacttctgaccaatatacatacctaaaccatgctcagcattatcctcgaataatgagttacaccaagctggacccttcttagaatccttgtttactgtatatggtgaagtagcagctgggttaccccagatagaagaacaacctgtagcattagaaatgtacatctgctcaccgaataactgtgtaattaatctagcatatgatgtctctgcgcatcctgcacatgaacctgagaattcaagtaatggctggttgtactgagaaccgattggagtttcaacaagtgctggcttgatttccttcttaccaacgttagcaacgaggtaatcaaatacaggctgctcagctgactgagattcctgtggaaccatcttaatagcttctcctgccttaggacatacagtaacacactcgccacatcccatacaatctaaaggagatacagacattgtatacttcatagttgtatctacagcatgcttagaatctgcaagcttaatgtttgctggagctgctgtaacttcatcagctgaaagaataaatggtctgattgttgcatgtgaacaaacaaatgcacagctgttacactgaatgcaggctgctggatcccactcaggaaccataacggctgttcctctcttctcgtatgcagaagcacctgtttcgaactgaccatcagcgcaatccttgaatgctgaaactggaaggctgtcaccatccatcttagagattggctcaagaagatcgttaactaacttaacaacttctggacgtcctgtcttagcttccttaggagcatcagcttctggattagcccaagaatctggaacttctaccttatgtatagcatctacaccggcatcaatagccttgtagttcatctctactacagcatcacccttcttagagtaagacttcttagcagcttccttcatgaacttaatagcatcatcgataggcattacatcagctaacttaaagaaagcagactgtaagattgtgttagttctcttacccataccgatttcgatagccttatcaatggcattgattgtgtaaagctgaatcttgttatcataaatgtacttcttagcttcagcgttaagatgatgtcctaattcttcatctgtccactggcagttgatcatgaatactccgcctggcttaacatcctgtaccatcttcataccctgtgtaacatatgctgggttatgacatgctacgaagtcagcctgattgatgtaatatggactcttaattgggttatcaccaaatcttaagtgagaaattgtgataccacctgtcttcttagaatcatactggaagtatgcctggatgtacttgtctgtgtggtcaccgataatcttagtagagttcttgttagcacctactgtaccatctccaccgagaccccagaacttacattccttagtaccagcagctgaagtaattggagctggcttaacttctggaagtgaaaggttagtaacatcatcaacgataccgattgtgaatctgctcttaggagcatccttctctaattccttatatacagcaaagatagatgaaggtggtgtatccttagaaccaagaccatatctgccaccaactaatgtgatgtcgttaagtcctgcttcacgaagtgttgtagcaacatcaaggaaaagaggctcaccaagagaacctggctcctttgttctgtcaagtacagcaatcttcttagctgtcttaggaataacctttaagatagcttctgatgaccatggtctgtaaagtcttaccttaataagaccaaccttttcacccttagctgtaagataatcaataacttcttctactacgtcgttaacagaacccatagcgatgattactcgctctgcatctggtgcaccatagtagttaaataatccataattagtaccgagcttctcgttaaccttgttcatgtacttctcaactactgctggaagagcatcataaactgagttacaagcctctctgtgctggaagaagatatcaccattctcatgtgaaccacgagctgatggatgattaggattaagagcgtgtgctctgaattcttcaactgcatccattgggcacatatccttaagatcttcgtaatcccactcttcaatcttctgaatctcgtgtgatgtacggaaaccatcaaagaagttaaggaaaggtgtctttccttcaagtgctgcacagtgagctactggagaaagatccataacctcctgtgggttagtttcacaaagcattgcaaaacctgtctgacgacatgcgtatacatctgaatgatcaccaaagatgttcaatgcatgtgatgatactgtacgggcagatacgtcgaatacgcatgggagctgctcaccagctatcttatacatattaggaatcataagtaaaaggccctgtgaagctgtaaatgttgttgttaatgcacctacacctaaagaaccatgaactgtacctgcagcaccagcctctgattccatctcaactaccttaacagtactgccgaaaatgttctttcttccggctgctgaccactggtcaacataatctgccatcgggcttgatggtgtgattggatagataccagcaacttctgtatatgcataagctacatgtgcagcggctgtattaccatccatagaatgtttctgtcttgccattataaatatttcctccttaagaaaatttaggcggcataaatgtacccgatataaataaccagatatacattatacgtccctacatattacttaatattttattatctttattcccaaaagtaaaggcataaatgtgagatttcatgcttatttcattattaaaatcaatacaatgccattaaaaactggacttttccaatgtccaagcatcggaaaagtccaattacacgatttacttattcttattattactacattttattactaaaccattatattaatcgtcttcaccctgaagtgcatcataacctgattctccggttcttacctttactacatcctcaacatcatatacaaaaatcttaccatcaccgatatgacctgtatagagagccttccttgtagcattgataacatccattacaggaactgaagatattaccatctcaacctgtgtcttaggaagaagctggatatccattggaacacctctgtaatattcaggagcacccttctgtgtaccacatccaagaacctgtgtaactgtcatacctgtaactccgatatcgttcatggccttcttgaatctctcgaatctctcctgcttcataagaatctcaaccttggtaatcttcttgccatcacctgcatcagatgtcttaacaagagcaggtacagaagcttccattgattctgaaccgattacatcaacatcaccatcaacaaagtccataccaccaaattcgaatcctgcataagcacttgaaaggccatgctccataatatcaaggcctctgatttcttcttccttagaagctctgagtccgattgtagccttaattactgtgaacacaatcaccatgcatacagctgcccatgctgcaactgatacaaatcctaataactgaagcccaagctgtgtgaatccaccgccatagaaaagaccttcgcccttaattgaaccaccttctaaagcaattgcatatcctggagctgaacttgttgcaaaaaggccaacagcaattgtaccccagataccattcatcatatgtactgctacagcacctacaggatcatcaacatgaagcttgtagtcaagaagccatacgccgaatactactaaaaggccagaaacaatacctatcattgttgcaccaaatgcatctgttacatcacaaggagctgttataccaacaagacctgcaagtgaagcatttaaacacattgaaacatcaggcttaccatatcttatccatgtgaatatcatacatgttactgtagctactgcaggagcaactgttgttgtaaggaaaatagagcctaaatcttcaattgttgttgctgctgcaccgttaaatccataccagccaaaccacagaataaatacaccaagtgcaccaagtggaatattgtgtcctgggaaagcatttacctttataaccttaccattagcatccttttcaaacttaccaatacgaggtccaagaatcttagcgccaataagagctgaaataccaccaaccatgtgaatacaacaagaacctgcaaaatcatggaagcctaactgtgcaagccagccaccgccccagatccagtgagcttctattggatagataagtgctgagataactgctgagtatacacaatatgataagaactttgttctctcagccatggcacctgaaacaatagtagctgttgtagcacagaatactaagttaaatacgaaactagaaaaattaaaatctttgtaagctgtgaagatatcaaaaccaggctttccaataaaaccaagtaaatcctcacctaataagaaactgaatccaataagaacgaacattactgtaccaatacagaagtccatcagattcttcataataatgttacctgaattctttgctcttgtgaatcctgtttctaccattgcaaaacctgcctgcatccagaaaacaagagctgcacctataaggaaccacacaccgaataattcggcatctactgctgataaaatctcttgcataaccatttcctccctaatcagaaattctttttaatttaattgccggtaacagagttgatcaggttctgtacctgattaaacagaatgcaaaaaaggcgtgcaggcagttttcccaaactgcttacacgcctttgtgtacatcactgttcaattcatgctgttaattatactcgccattttcaataattattgaaaaaatcggacatttttattgactttttaattttttcttaataatattttaataaataaacttttagaggagacaatttatgaaacatatgatacagccatttggaattgacatgcataaaaatgttcttacagacacaaaagcagttaagcatatgcatttttacgaagcagataaaactaataccatccttaacatctcatttattccatcatccactacagaatggataatatgttacaacgataataatgacatatctgaattcatatgtatcggatgccagaacatatttacaacactttctcttaaagaatttgaccactatttcgggataagattcgacaacactggctgctactttaataaaggctgtgatattaagacttatcccgtcaacattacagacaatatattccgttatgagccagcccctcaatcgtatgagatgcagctaataaaggattttcacaattcttcatcctttaaagacagaattacactttttaaagcatttgttacagattgcaagaccttctgccctgtttctgaaaatattgagaaacttaacagacttatatattcaggtaccagtactgttgcagaattatcagcagaatcagaatattctgtaagacatatatcaaggctttacaacgaagtctatggtattggtgcaaaggattttatcaaaatgtacagattccagaatgtccttgcagccataattgctgacccagaacgtgataacagctcctttattgaaggtgcaggttattcggatcaggcacatttccaaagagaattcaggacatttatgggaatgactcctaagaagtacataaaacttatcaagaatttctgatatacatgctaaaacaggtgacaatcttcacaatcagactgccacctgcttttcttaatctccatcagttaatataaaatcactcatcactgtattacatatatccatgccatattcagtaagccttaacatatctgcctgctttacaagaagacctttattaatattctgttctgtctctttagcataaacatcattaattgaaactccaaacctgttctgaaaatccttcacatcaactcctgcaacctttcttagtccaagaaacatgaattcttccattgcatcttctttagtcagtatttcaatattttcatgaagttttcctatatcaccgttaagctctatatacttcttgacatctcttatgtcggaataccgcacgttttctgtaaatcctgctgccgaacacccaaagccataatactctcctctgttccaatacagaagattatgcctgcattcgaagcctggtctgctataattggatatttcgtatctttcataccctgcatttccaagaatctgcttcgttatatggtacatgcgcctgtcctcttcctcatcaggaaccggcggaaacttgtcaatattatcagccagataagtgccttcctcaagaataaggctatacgccgatatatgctccggctgtaatgccatcaccttgtcaaatgtattttcaagagttgcttcagtctgccccggaatagccgacataaggtcaacattaatattattaaagcctgcagcccttgccagtctgaagctttcctcaaactgttcaaatgtgtgtattcgcccaagcatttttaattcattattatcagcagactgtaagccaaagcttaacctgttcactcctgcggctctgtattctgaaagcctgctttcattaactgttcccggattacattccattgttatctcagcatcatccaaaacatcaaaacaatccctgacagcagctaatatgtcagctatacagccatcaggcagtacagacggagtacctccgccaaagaatatggatgttatcttatcttttacctgcccatctgctgtatttctgatttcattaataagtgccttagtgtaagcatattttacagcatcaccagccggagcagacagaaaatcacaatatatacatttgtgtacacaaaaagggatatgtatatatatccctttttcatatgttttattcatcatctaactttaatacgctcataaacgccttctgtggaatctctacattaccaatctggcgcatacgcttctttccttccttctgcttctcaagaagtttcttctttcttgagatatcaccaccgtaacattttgcaagtacatcttttctgagtgccttgacagtttctcttgcaattaccttgcttccgatagctgcctgaataggaatctcaaactgctgtcttggaatctcttccttgagcttctcacacattttacggcctctctcctcagcattgccggcaaatacaatgaatgaaagtgcatcaacttcttctttgttaataagaatatcaagcttgacaagcttagaacgctcataccccttcatctcataatcaaatgatgcataacctcttgagcgtgatttaagtgcatcaaagaaatcatatataatctcattaagaggaaggtcatacttaagcagtgcccttgtctgctcaatatattccattccattatatatgcctcgtctttcctgacaaagcttcataataggtccgacgaattctgttgtaaccataatctcggcacttaccataggctcttccatataatcaatctcagaagggtccggcatattagacggattagtaaggtcaattacatctccgttcgtcttgtgaaccttatatataacgcccggtgcggttgttacaaggtcaagattatattctctctcaagtcgttcctgtataatctctaagtgaagaagtcctaagaatccacatctgaagccaaatccaagtgcaatagatgtctccggctcaaactgcagggctgcatcattaagctgcagcttttcaagtgcatctcgtaaatcctgatacttggcgccatctgccggatatagtccgcagtaaaccataggattaaccttcttgtaaccaggaagcggctgctcacatggtctgtcattatcagtaactgtatcaccaactcttgtatctcttacattcttgatacttgctgtaatataaccaaccattcctgctgtaagctcatcgcatggaataaaacggcctgcaccgaaatatccaacctcaacgacctcttctacagctcccgttgccatcattcttatcttagtacccttcttgacagtaccttctttaattcttacaaatatgataacacccttatatgcatcatataacgaatcaaatataagcgctgaaagtggtgcggaagcatctcctgatggtgccggaatcttagttacaatctgttcaagaacctcttcaatattaattccgttcttagctgatataagcggtgcatcctgtgcctctattcctataacatcctcaatctcttcaataactctttcaggttctgcacttggaaggtcaatcttattaattacaggaaatacatcaagatcatggtctaatgcaagatatacattagcaagtgtctgtgcttcaattccctgtgccgcatctactacaagtatagcaccatcacaggctgcaagtgctcttgatacctcataattaaagtcgacatgtcccggagtatcaataagattgaatatatattcctgtccatctgatgccttatatacagttcttactgtctgtgctttaattgtaattcctctttctctctcaagatccatgttatcaagaatctgctcctgcatctctcttgatgtgagaagtccggttttttcaattattctgtcagccagtgttgacttgccatgatcaatatgtgcaataatacaaaaatttcttatgttcttctgattaattcctgccattaatataaccccgcttgttttaaataatcttttatgccatctgctatggcttgtgctgtcttagttttatcagttgttactttctttaaatctgatacattagttataaaacccatgtctattactgtgcttgtacatttgctatgagcgttaatataataattatcctttgcatctccaactgtaccggttttcactccacgattcttaattccagtacttttttccatgctcttaagaataatccttgaaagctctgctgcctcaacaggctttgtcgtgtgaatataactctccgcaccggaaactgatgtatctgcattatatgaattcattctaagtgacacacatatatatacttttgacgaattacatatctttacacgttcttcgtctgtaacatccctatctgatgttcttgtcatgacaacctcaatcccatcggattcaagctttgacttaatatcaagagccatttcaagatttatatccttttccttcctgcctgatgacgacactccagtatcctttccaccttttgatggatcaagacagactacagcctttgaagacgcccctttagattcaacattcttattatcattaagatatccacttgttctggtttcgctctcggtttctttgccaataacgtttccctcacttacagtatccttaaaaaaatcattatacaccattaaagtgataaccagcaagcagacaagcgtagccagtccgaataatttatctattctaaatgttttacgatgtttcattatagtaccccattaatatttcttgtactattgtccataaggaaggggtaaatgtcaacaacttttaaccatttcttttcttaactgacgcattattttcttttcaagccttgaaatatatgattgtgaaattcctaacatatcagcaacctctttctgtgtcttttcttctccatcctctgaactcaaaccaaatcttaaatcaactattattctttcacgctccggaagctggtttatagcctttttaagcattttgcactcaacctctgtttcaatatccctatatataatatcctcatccgttccaataatgtctgacaacagaagttcattaccatcccagtcaacattaagcggttcatcaattgacacttctgcttttatcttactgtttcttctaagatacataagaatttcgttttctatacaccttgatgcatatgttgcaagcttgatatttttatccttatcatatgaattaattgctttgataagccctattgttccaattgatatcaaatcctctacaccaacccctgtattgtcaaatttcttcgctatatatacaacaagccttaaattatgttctatcagggtgtgctttgcttcagcatcagaagctgtccccagtgcttctattgcgttctgttcctcacttgccccaagtggtgccggcaatatatctgtcccacctatataatgtacgtcaccctgctttaataaacaaaaattctttatagaaggcattaccttaaactgaaaatgatccgccatcgcaacctttactaccatatttctatccatccttttattttcttcaaacttccgattcttctacataatcatgtccttccccaaaagggcatgataatccccattcttattaatctgcctaagagacatacctatagccgcatgctcccttttcacaacattttctccctcgtatatatgtatataatctgctgttatgatttccatcatcccacctgaatttcccacactattatatggaatcagatgatatccaagcttttgtaagttatctatgtcactgagaatatcgttgaaatacgttctttcaaccactgtaacaggtcttttcccaacataatcaataaggctgttgcctgtatcaattattgcgtccatttcaaattcccgttctgctacgccaatcacaatgtgtcttttcaaaccatctgttatcctgatagttttaagtgtcttaagcacaatgacaacaactataaccgtcacagtaagaaagattacaagctcactgtcagacagaattacatttccaataaaataccctgcaaatgtgtactttaaccaatgcattatcccacctgcaaaaagtgcaataagaatcattcctgcacctgctttcaacagattcctcatataaagctttaattgttttgatgttttctgcttaaagtctttagtaccggaaagcattatcatagccatgattaatgttaccggaacatatgtaataaacttttcaagcagtgcaaatcttagtggaatacacacacatatgacagcccatacagctcctaaagtggcagaaataatcattctggatattctggcagaaaatttaaatatccagtctgttataagcagcacgcacaggtttgtcacaaggtttattccaaacagaacatctgcatatataaccgtttcgtacatcacctccttgttttgaatccgtttctttgttacaagtggaattatatacgacatatcatgcaaaatttgtcaaaacaacagagtgagcacaaaaaaacaccgccagcaaactgacggtgttaaatatacttatattaaattattacttcttattcttctgtaaaaatgttggaattgtgattcctctgtccttaacctgtggtgtaacaggtgatggctgcttaagtcctggaagcggagcatcatttgatgccgaagatgttcttgctgctggctgtgaatatgtatactgtggcttaacattaacagttggtcttgttgcctgtgccatacctgcaaatcctgccatagccttattaacattaccatcctcaagacctgttgcgataacagtaattgtagcctgatctgtaacgctctcatcatacatagcgccaaagataatgttagcattatctcctgcaagttcctgaacgtagcttgcagcttcattagcttcgataagactgatatcacctgagatattgatgataacatgagatgcaccctcaatagttgtctcaagaagtgggcttgtaacagcctgcttaactgcttcgatagccttgtcatcgcctgtagctgtaccgataccgatatgtgcaacacccttgtccaccataacagtcttaacatcagcaaagtcaaggttaataagacctggtacattgataaggtctgtaattccctgaacagcctgctgtaacacttcatcagccttctttaatgcctctggcatagttgttcttctgtctactatctctaaaagcttgtcattaggaataacaataagtgtatctacgttctccttaagcttctcaattcctgattcagcattagccattcttgttcttgcttcaaacttgaaaggcttagtaacaacacctactgtaagaattcccatatccttagaaatcttagctactacaggagctgcacctgtaccagttccgccacccataccacatgtaacgaataccatatcagcacctttaattgcctgtgtaagttcttcaacattctcctctgctgccttctcaccaatctcaggctgtgcgcctgctccaagtcccttagtgagcttctcacctatctggatagcagttggagccttacataaagtgagtgcctgactatcagtattaataccaataaattcaactcctccgatattctcatctatcattctgttaaccgcgttatttcccgctccacctacaccaacaactataatctttgctgatgactcctggtcattagtcattatctctaacaaggttgttgcctcctttaatatctaaaaattgcactacataatatattataatttttcgtctaaaatatcaaccgtttttttacttttcacgtttaaaaattatagaactttcatcgccattataatcatcaagatacagtgttcctttaagtgttccaaatctggatgataactgctttaattcaaaaagcctgtctgtaaaatccttgctgcttccaaggcttaccttaacatcgcccatataaagcgtaatattataagaggcatcaaaatacactttgtccacatcaatatcatacttatcaaagctctgtataagatcaagaattgtattgtatatatctgcatttcccacatcaagcttcgtattgattactattgaatcaaacttaagtccgtcaatctgcggaacattttcatataaatccgttgagctttctactacaattccatctttatcaaaatacatattacagcccatgtacctgacataacctactattgccttttcatatactgttacataaagcctgtccggccagtccgtctcaacatcatatttctggataaatggtattttggtgtctttttgtccaaaaatcctgaaatatagcagattaacataatcaccaccaaatatatattttttaagttcttcatccgaataatgagttgaacccacaaattctattgtatcagcctcaaacaccttatatgtaacaccaaaaagcattccggcaacagctgcaataactgcaaatataataagggctttctttctttttctgccccgtctttttttctggtttacactgttactattcctactacccattatctttccaacttaatctgactgcttatattaaatacaaccccaagttcaagcagcaaaaatactgccgctgtacctccataacttatgaatggaagtgatactcccgtattaggtattgtattagttacaactgctatattaagaattacctgtatggcaatatgtgcaaatactcctgttgcaagcattgaaccaaacaaatcaggtgcattctgtgctatatggttaattctccataacattacaataaacagggcaatcaggcagaatgctccaaaaagtcccagctcctcacatataacagagaatatcatatcattctgtgattccgggatatatccaagcttctgaagactcttgccaagacctttgccaaaaagacctcctgagcctatggcatataacgcctgaactgtctggtatcccttatcatcaatatatttctcaggattaagccatacaagtatacggtttaatctgaattttccagtcatatttcccgacgctgccatcttctttatccatgagtaaaatgcgccaaaagccaccgctgccagccccgtcagtgcaacatatattttatatcccggatatgccacaaatgtcataacaacggagataagtgctacaataagtgcgctgctcatattagaagacagcacataaacaagcagtgccggtgcaaaaccggctattatacatatcactataacagtcctgaatttctttatgttctgccctgctttcactataagaagtgcagtcatggcaatcgttccaatctttacaagctccgcaggctggaattgtcccaaacccggaatctttatccatctggtggctccatttcttgtaattccaagaggagtctttaaaaggaacatgcaaagaagtccgcctatatatattacaactgcaagcttcttaagataatgataatctaaaatcttcgtttcaactatcattaaagcaaagcctattatagtaaatataagctgttttctgaaataaaactccggatcaccctcttcaatctgtgctgtataagagcttgtgctgtaaatcattgtaagtccaaagccaacaatgaatacaagcacaaaaagaagagtgtaatcaaagtaaaatccatattgttttctcttttttttatttctgttatttcttctatttctattattccccggcatatagcaccgcctttttacagattattaacaagatccttaaatattcttcctctctgttcgtaattatcaaacattccccagcttgcacatgcaggagataaaagaaccgcgtctccacttaccgcatttttagcacatatatctactacctgttccattgaatcagcatattcaatattctcaaagccatatttcttacatgtatcagcaatcttggcacttgtctgtcctataagcacaagaagcttaaccttatccttaaatgcctttacataaaggtcgaattctgaacctttatcataacctccgccgataagaattgtaggcttaaccatagcttcaatagccttaactgctgcctctgggttagttcccttggaatcattatagtaatcaacgccattctttgttgcaacatattcaattctgtgttcaacagccttaaatttcttaacctgttctattataatatcatcaggaattccggcagccttagtcattgcaattgctgcgcatacattttcatagttatgctttcctaaaagattcatgtcatgaacattcaacatgtcataatcattagttccatctgtatacttaatcatctcaccatctacatatgctccgactgatggctttctttcacttgaaaaccacacaacatcagccttacactcaggtgcaaagtctgcaagatacttatcctcaagattaagcacacatgtatctgccttagtctggttctcacttattctttccttggtccatgcatagcattccattgtatggtgtctgttaagatggtcaggtgtaatattaagaattgcagatacaatcggatggaattcatgtactgtctctaactggaagctgcttatctcagcaactgtatatgaatcctcacttgtctttaacacttcacctgtatatgaattgcctatattaccaacaacaaatgttttctcattatatgcagcaattatctgtccaacaagtgctgtagttgttgtctttccgttagttcctgtaattgcaataaccttacccttatcataattatatgcaagctcaatctcgccccatacagggataccggcattcttaaatgtaagcactatcggactgtcaataggaacacccggacttattacaagcagatcaatcttcggaagaagtgactcatcaaatgctccgatgataatctctgccttgttatctcctaacttctcctgcaccttctgtctgtcaagcttttcattgccatcatacagtatgcagtcagcaccaactttattcaaaaggtctacggctccaataccgcttatacctgttcccacgaccattaccgtcttattctttaaatccatcgtcgtttacttcctttcatacaaaatgtatacaaaaatatattactatcaatcatcgtttttttcaagttgaactgacctttctataccaatatacggcaatatattttcatacagtgtcttaacaacaggagcagcaattgttccaccataatatacacctgtcggttcatcaattaagcacatcgctataacctgtggattatcagccggagcaaatcctatgaatgatgaaatatattttcctgaacctcttggcagcttctgtgatgttgccgtttttcctcctattgaatagccgtcaatatatgctttcgttcctccgccttctgacactacaccctcaagaatctttttcatcgtttcactcgtttgggatgatattgcctcatcctgtgttgaatatgcaaactcatttaccactgaaccatctgatgaacctgtgtataagccaaaatgtggtgtaacaagtctcccaccatttacaatcgccgaaacagcccttaacatctgaacgggtgttatctggaaagactgtccgaatgacattgtggcaagctcaaccgcacctacattttcctgcttatgaataatcgttcctgcctctcctgacagatctattcctgtctttgcaagaagtccaagcttacccatgtacagatacatattatcagtaccgactcttctgccccattcaacaaatgccggattacacgaattatacactgtatgtgtaaaatcctgtgttccatgtcctgttgttttgtgacatcttattcttctgtcagaaacaatcgttgcacctgaacatgtgaaagaatcatttaaacccaccacgcctgtctcaagtgctgctgttgcagtaaccgtcttaaatattgagcctggctcgtatgtatcatttatgcagaaattccgccacatattattaagaagatccatcttatccttctgtgcctcttcctcatcaggctcataattaagctcatacggagaattaagattgtattccggaacatttgccatggcaagtatctctccattatccggacgcattacaattatgcttacctgttttgcctctttctttaccatagtctcccatgcaagctgggttgcatatttctgtatattaacatcaagcgttgtatacagatcctgtccgtcaaccggcagaatacgatcttcccggctgccctttatctcaatcccccctgcatcagacagtgtaagaatctgaccgttagtacctgacagatatgtgtcatatttagcttccagtccaagtattccctgattatcagcaccagtaaagccaagcactttggaagccagttcattatacggatatacccgcttataatcctcgtcaatcttaacacccggcaggtcatattcccttattgcatctccaatatcctttgccacatttgtcttaatatattccatagaggatactttcttaactttcttagtcacttcctctacgtccatatcaagttcacctgcaagcacttttataaccttatcttcgtcctctatctgactatgtattacagaaactgtacataccacttcattagctgcaagtatttcgccatttctgtcaagaattctccccctctttgccttaattctcctctcccgctgatgcagctcatcagccttctgcatataatattcagactttaccgtcataataacaccaagccttacgcattcaagaatacaaaccataaagattgcagctatcattaacacaagtttttttctatgaccggtgctaagccatccaaatgtgtcattatccttcattcacaaataaccccgctttagtcttctacattttatgagaagtaaagcagggttattctacttattattacataattttagttactgcctgttgcagccggttccgaaacagggatatctgaaacgcctgattcctccggtgcatttcccggatcaacatatggctcgtctgtatccttatacacattcatataaggcagcagctccgtcataatgtcttttgcaagtataagtgcatctgatgtacttcccgatgtaccagtcgttccatccggttcatcaagaacaatgtatattgcaaatttaggatcatctgccggagcatgccctataaatgagataacccacttaaggtcagctcttgggattttctgtgcagtaccagtctttcccgcaatagaatacccctctatatacgccttatgtgctgttcctaattctactgtattttccagatatttcctaagatactttgatgttgaagccgtaacagtctgtcttacaagaaccggtgaattttctttaacaacttccccattagctgattctattctcttaacaatatgtggctgataatacttgccatcattaataagagaactatacgctgacagcatctgtaccatattaacattaacattctgtccaaatgaattggttgcagcatctattgtagttatcttattctcatcatacataatacctgtagcttcaccaggaaggtctacaccagtctttgcaccaaatccaaacattttctcatactgtgcaaatctgacattgccaagctttattgcaatattaatcatgtaaggattacatgaattttccaatgcctgcgacaatgtaagcacaccatggcttcctattgttgaatatgagtggcacttaatcatatcaggaccaacatactcatatcccttacattcataagtatctccatcatgcacaacgccttcttcaagacctgctgcaatagtaaatggcttataagttgaacccggctcatatgactctgatacacaatagttagtccataactgatacaacgcattggttacatctgtatccgacattgacgcaagctgctcttcagaatatacatttgcaagatttctgggattattaaggtcaaactgtggatagcttgccattccaagaatctcaccattcttaggattcataacaacaattgctgtattcttagatggtttttcctgattatatgcaaccatatatttctctattatagactgcacattataatcaattgttgtaataatgttattaccgttaactgctgcctttgtcgtttctactgcattgagatcttcatcaacatagctgtatgaaactccgtctgttcctgaaagctcatcgtcatactggctttcaagaccaagctcaccaccattgacattggatgcaaaacctatagcatcgcatgcaagagtattgaacggatattttctcacatagctttcctcaaaccatacaccatatatattgctgttcttctgtgccttaagctcattaaattcagctatctcatctgatgtcagttccttaagcagcttctgatactggcttgaaggattatcgttaattatttttttaatattatctttatcaagaccaaaacattttactaatgcatctattgtattattaagatattttccgtcctctgatgtcacactctttacatcaagtatcagattatacaccttctcactatatgccagaactgttccgtcacttgcagtaatattaccacgcatataaggaattgtagttgatgtatatgtctgatgattaagcaccgcctgggaatattcctccccatgtgtatagttaatcataaatatccttacaccaagtacaagtaataatacaaatactattataaatgtaacattaattcttctgtgtgtcctcttaagcattgcgcgtttcctgcgcattattttctttcttcttgcttcactggtattgtccataaatttatcaatcctttatatcacactgccacacattttagttattttgagatatccttatactgctttacatattcactttcctttgaatcataaccgattacctggcttctgcttggatataccataccaagttcattgacagctgtatcatatattgcgttataatcaattcctgcattaatctctgattcatggctgttattctctgccttaagtgaattaagctgattctgaagctcaactacagcagtactgttagtcttaatatctgactggagattaagatactggtagcatattgcaaatactgctgttgcacagatagcaagtacagtagtatacacaaggttaaccctgttatttcttcttatctctcttcttctttgtcttctctcctgctcctgctcctcaattcttctttcatgctcataagtatgtacttctggaacagtctgcagctttcttactgcacttccatactgatattcagttgtactgtgatttacaacatttcttctcttctccaaaactttcccctccataaatgttttatattctttcaaacaccctcagtttagagcttttagaccgctgattctcgttcagttcttcatctccgggaactataggttttcttgttataacctttccttttgatttctttccgcatacacatactgggaaatccggtggacatgtacatggattctcattgtttctaaatcttgccttaactattctgtcctctagtgaatggaatgttatgatacataaacgtccctgtggattaagcctgtctatcatcatatcaattgaattctctaagacatctaattccctgttaagttcaattcttatagcctggtatgttctcttggatggatgacctcctgtcgccctcacctttgccggaatagaagcctttataatctcatttagttcaaatgttgtttctatcggcttttcttttcttgccgcaactatatgtttagcaatattcttggcaaatctgtcctctccataatcccttatgattctgaaaagctccatctcactatatgtattaacaagatcctttgctgtcatctcctgtctctgatccattctcatatcaagagcagtatctacattataagtaaatcctctgcttgctgtatctaactgatacgatgaaactcctatgtcaagaagtatcccatctactttatcaattccaagttcatcaagaaccttgtccatattgcaataattatttcttactattgttacccgttcttcgaattctttaagtctttctgtcgctgccgcaattgcgtccgcgtcctgatctatacctataagtctgccaccacctgtaagtcttttcgctatctgatatgaatgtcctgcaccgccaagtgttccatctacatagattccatcaggtttaatattcagattgtcaattgtttcttccaaaagaactgatttgtgtttaaattccataataaacctcatgtctgcatattatatagaaaatccaagactctccatattcgctgctacttcatccatatcatcatcataggtactgatactctgcagccagcggtctttgctccagatttcaattctgcttgcaacgcccactaaaactacatctttttccaagcctgcaaactcgcgtaatactgatggaagaagtattctgccctgcttatccacttctacgcttgctgcacctgcaagaaagaatcttgtaaactgtcttgcattcttattggtaagtggtaatgtctgtaacttttcttcaaatttctgccattcatcattcgggtaaacaaacaggcagttatcaagacctttggtaaccacgaattcatctcccagaacctcacggaatttagccggtacgattagtctgcctttagcatctattgtatggttgtattcgcccatcaacataactatcgcaccccactttctaccattaagctccactttccaccactttagtgtcaattttatacttaaagtgtttaaaaaacaagtcctttttttagtttatttaatgtcagaaggcagttaataacagtctttttctccattttatgttttgattgcttatatagtgttttgtcatcattttcagcacaatatatagatatattcttatacttttatataaattattttaataggtaaattatatgttgtttttaaagaaaaatttttgtataatatgattttgtactggattcttttttacattttaagaactctggaacgaataatcataagaataattaatgaggagaatctattatgaagcttggtatcgtgggtctgcctaatgtcggcaaaagtaccctttttaattcacttactaaggcaggagcagagtcagctaactatcctttctgtacaattgaccctaatgtcggtgttgttgcagttccggatgacagacttgacaagcttgccgctttatataattcagcaaagataacacctgctgttattgaattcgtagatattgcaggtcttgttaaaggtgcatctaagggtgaaggtcttggaaaccagttccttgccaacatccgtgaggttgatgctatcgttcatgttgtaagatgttttgaagattctaacatcgttcatgttgatggttctattgacccaataagagatattgaaaccattaaccttgagcttatattctcagatattgaagtattagacagaagactcgctaagcagaagcgtgcttcttataacaataaagatattgctaaagaatgtgaccttctcgaaagacttaaggctttccttgaagaaggtaatttagctaagaattttgaatgtcaggacgaagatgaagaagcatttttaaaggaatacaaccttcttaccgctaaacctgtaatctttgcagctaacgtatcagaggacgaccttgccaatgatggtgctgacaatgaatatgttgcaagagtaagagaatactctaagaaggataactgtgaagtattcgttatctgcgcacagattgaacaggaaatctcagaattagatgatgatgagaagaagatgttccttgaagatcttggtataagttcatcaggtcttgataagcttattgcagcaagctaccgtattcttggtctcatcagctacttaacagcaggcgagaccgaaaccagagcatggacaatcactaagggaaccaaagctccgcaggctgccggaaagattcacagcgatttcgaaagaggctttattaaagcagaagttgtttactatcaggatttacttgactgtggttcatataatggagccaaagagaaaggtcttgtaagaatggaaggaaaagaatatgtcgttaaagatggtgatgtaatccttttcagattcaatgtataatattaatgggcgtgtggttttaccacgcgcccattatttctttaaacttcttaacattatcagctacatctccagaaaagattgctgaacctgctactattacattagcacctgcctcaagaactgatgcaagatttccggcattcacgccaccatcaatctcaatatctgtatcaagtcctttagcatctaataaacttcttatttcttttactttatcaagtgattccggtataaacttctgtcccccgaatcccggattaacgctcattacaagaaccatatctaccttatcaagataaggctcaattgctgataccggtgtcggaggattaagtgttatagctgcttttacaccacattccttaatcttttctaatgtagcaacaacatccttacacgcttcaacatgtactgtaattatatcagcgcctgccttaacaaagtcttctatatatcttataggctcttcaatcataagatgtacatcaaaaaccttgtcagtcgcacttcttgctgacttaataaccggcattccgaatgaaatactctttacaaaaagtccatccataacatctacatgaacatattcagctcctgccttatcaattgtttcaagctcttctcctaatttcttgaagtctgccgataatattgatggtgacaaaatttttttcaaatcactcataattaacaacctttctgttttcaagtacatttagtacttcttcttgttctttatttcttcaaacatatctgtatatgacttatatctgtcataattgataattccgtcttcaactgcctgttttaccgcacatcccggttcgcttacatgcatgcagccattgaatctgcactttccttcgaatggtacaaactcttcaaagtaaaatcttaaatcttctttctcaacatccggaagattaagtgatgtaaatcccggagtatcacatatatatgtttgcttgcatacattgtatatctcggaatgtcttgtagtatgccttcctcggcctatcctgcttacttctcctgtctggctgacttctccctgctcttccatgtccggtataagcagattggtaagtgtcgactttccaactcctgatggacctgcaagcactgtagtctttcctttcagcacttccattaccctgtcaatgccaatattattctttgcacttataaatatgcactcacagccacagccttcgtatttcttctttaattcattcttatattcatcatccgccagttcttccttgttgaagcatacaacggtcggaacatcctgataattcatcataagaatgaatttatcaagcagattaaaattaggttctggcgtctttactgcaaatataaccattgcctggtcaatattagcagaagccggtcttataagttcgttctttcttggaaggatatccaccacatttcctttgaaattatccttatcaataacttctatctccacattatcaccaaccagtggtttaatgtgtcggtttctgaatatcccttttgccttacattcataaataccgctggtttctacatgtatatagtagaaaccagcgatacccttaattatctttccctgcatataaataattatacctgattaattctgtgctgcatctgacttagcaccaactgtaattgtaatcgtagttccctcattcactgtacttccagagctcttatcacacgctgttaccagaccaactttatcctctgatacagttgtatcattcttagttgtataattaaggccattatcttttatccatttaatagcttcctgttcagtcttgccaaccaagttaatcattgttactgttttctttacttcttcctgcttatgacttaccgtaattgtaactgttgttccctctggaacagaagtaccttctgagtaatcacttgaaactacatatccatatgttccacttgatgttgtataagaagcattaaccttaagtccgttattttcaagccactgtcttgcttctgactcagtctttcctacaagattagccattgtaacattcttaatctgctttccacggcttactgtaattgtaactgttgttccctgtgccacacttcctgatggagaagccttaattactttgccttcatcaacagtgctgctgtaatcataatcaaccgaaaccttaaatcctgctgattccagtttttctcttgcatcagattctgattcccctgtaacagatggaactgttgtattaacaacttcttccccaccgcttatagtaagaataatctgtgtattctttgccaccttggcacctaccttagttccctgtgaaattacagtatccttagccactgtcttagagctctgtacaacctgcttatagccaagtccgacatcattaagtgccttaacagcttcatccttagtcataccctcaaccttaggaactgtaactgtatccttggcatttgctgttgataccgtctcttctgtagttgatacagtttctgtattttcattcttatgtgacttagtgcttccaacaagcttaacaataacaaatattgtaacaataagtataataacagctattcctattccaattattttcataattaaatccagcttgtcattatcctcatcatcaatatctacatcctcatcgtcttcctgtaattcattatctgaatcttcattttcatcatcttccagaaaaatatcatcatctgataatgaatcatcattctcaccagcattaacttcttctgtatcagatgaagctgtagctgccactcctgctgctgcataaaccggagccatcttaacaaaatcttcatctggcattacaagagcttttttaagatctgttataagttctgctgctgtctgatatcttctgtccggtttcttctgtgtacatttaataacaattctgtctatacttaatggtatatccgctacaaccgtagatggtgcaggtatctcatcctgaatatgctgtactgctactgcaactgtagagtcaccatcaaacggtactgtacctgtcagcatctcaaatattgttataccaagagagtatatatcacttctcgcatcagaatatccgcctcttgcctgctcaggtgaaatataatgaaccgaacccattgttgatgacgaattaattgtacttgatgaagcaaccttggcaattccaaagtctgttaccttgaccttgccttccttagatataataatattctgtggcttaatatccctgtgtacaatattatgcttatgtgctgcatcaagtccgttagcaacctgaattgcaatgctaacagcttccttaaaaggtattttgccacgcttttctatgtatttcttaagagttatgccctctacaagttccattacaatgtaatatactccgttctcatcaccgacatcatatacattaactacattaggatgtgtaaatcctgctacagactgtgcctctgccctgaacttagatacaaatgtcttgtcttcactaaactcagacttcattaccttaatagcaacatatctgttgagtttatggcactttgctttgtaaacatctgacattccgcctgtgccaatctgctcgattatctcgtatctgtcagctaaaaacattccttttcttaacataacctatccctttcacttacagttctacaattataactgaaatattatccttaccgccattctcattcgctctgtcaataagcattctcgctgcatcttctatatcggcattgttccttacaatgcttaatatctctgcatcttcaagcatattagtaagaccatcagaacacataagaaccttactgttttctttaagatcaattgaaaacatctctggttcgacttgttcctctactccgattgcccttgttatgacattctttctggcatgtgttcttgcctcgcttttacttaactgtcctgcaagaaccatctcttcaacaagtgaatgatctcttgttatctgagttatgtcattgtcatctattacatataatctgctgtctcctacattagcaactcttaatacattatcaaatatggttgcgataacaagcgttgttcccataccatagtaatcctctgattcagatgccttctgtaaaagcagaccattaaccatcttaaccgaatcattaataatggatatcgcatcttttccctgtgactgttcaataagagttttaatagtttcaactgtaaaacgtgaagctatatcaccagctttatgaccgcccattccatctgctacaataaacagattaggcaggcatccaaccctgtcaacagatgtatatatataatcctgattaacggcacgcgtcttgcctatatcagtaatcgccgttgctttcatcaacatcctccatatacttattccttaactgtccacaggcaccatcaatatctctgcccatttcccttctaattgtaacatttattccgttcttttcaagtttatttttaaatgcgtacacttcatccttaccagtctgcttataatcacgctccttgataggattaacaggtataagattaatatggcagttcatgtccttaacaagttcaatcaactgctttgcacattccattgaatcattgacgcctttaacaaggctgtattcaaatgagattcttctgcctgtacattctatgtaatacctgcatacatccattatctcctcaattgaatacttatttgctataggcatcattgtctttcttagttcatcattaggagcatgaagtgaaatagcaagtgtaatctgtaacttaagatcagcaagttcctttagcttaggtactattccacatgaggatacagtaatatttcgctggcttatattaagacctctctcatcattgataagttctataaacttaataagattatcatagttatccattggctctccagaacccataactacaacattgcttactcgctcccctgtaatcttctgtattctgtatatctggtcaagcatttcagatggtcttaaatccctgactttgccgttaagtgtagatgcacagaaacggcatcccatacggcatccaacctgtgaagatatacatactgaattaccatgatgatatttcatgagtacactttcaacataattaccatccgataatctgaacagatatttttctgttccgtcaagctttgaatgctgtaccctgacaggctctaagcatacatattctgatgtttcctttaacttctgtcttaatgcattagaaaggttggtacattcatcaaaactgtctgccagcttttcatgcatccactgatatagctgcgaagccctgaacttcttttcaccaagtccagccatatatgttacaagttcgtcataattaagtgacttaatatctgtcatgtctattctctcctaagttttgcaacaaagaacccatctgttccgccattctttcccggcagaatctgtctgtattctatcttcttaaagccatattctttacataaccagtcagcattggcttcattctcttctgaattaattgtacatgtactgtacatcattataccgccctgcttaacatatgcctgtacaacagaaagtatgctctgctgaagctcttttaatgaaacaagcttgtcctctgttatattatatctgatatcaggctttcttcccataacgccgagtcctgagcatggaaggtctgctataacaacatctgccttctctttcatggattcatccattacgagtgcatcttttacctgaacttctatattattaagtcctagccttgatatattttcttcaataagtcctgccttataatctgatacatcccttgaatatactttaccatcagtgccaacacttattgcagcattaacactcttgcctcctggtgctgcgcacacatcaattactgtgtccccagccttaaatccagtcatatatcctgctgtcatggagcttatatcctgtatctggtacagaccatccctgaaactcttaagtccggctatataatcatagtccttaatctctaaagcatatggtataccttcaacatctgccacagatacattttcctgtgaaagaatcctctttatctcttcaaccggtgcctttgctgtgttacatcttacataagtctttttttcctgcttaaagcctgcaagaattttctcagtcttatcaatacctagctgactatgccacattttaactatccataatggcattgagtattttacagaaaggtactgttcaatatccttattcctgtcaggatatgtaatattgtctttatttcttgcaatgtttcttaagactccgttcacaaagcccttaagtcctgtgaatccacgttttgcagccagctttacagcctcattgcacactgctgaatccggaatattatccatatatattatctggtatacagacatttcacatatatttcttattagtggtttcatctttcttacaggagtctttgaaaactggtctattatatagtcaagttcaattctgttctcaatcgttcctagtgataatctgcttataaatgctctcttattcttatcaagatactggtactttgtcagtgcattattaatgagaaggtgtgaaaattcacccttctcattgatttccataagtatatccagtacaactgcccttaaattcaccgaatcagtcacggcgtcttcctccaaataaataaatcagtcttaaaagctgtaaaattgctgtggctgctgccgcaacatatgtcatggctgctgctgaaagcacttttcttgcctgtctgttctcatctccatacaggaatccttctgattcaagaagctgtaatgctcttgccgaagcattaaactcaaccggtaatgttacaagctggaaaaggactgccagactgaacataagaataccaatatctataagtatattagttgagccaaatataagtccaagcacaataagtatccatgatacctgcgaaccgacgctggctaacggaaaaagtgctgttctgaagcttaaaggaccatatccgtaagcatgctgtattgcatgtcctgtttcatgggctgcaactccgatagcagcaacagatgttgaattataaacagaatctgacaggttaagtgtcttatttcttggattataattatctgtcaggcttcctgatactctctgaatagatacatcgtatattccctggcttcttaaaagctgctctgcgaccattgcgcctgtcattccttttgaagatgacaccttggaatacttgttaaatgtgctttttacctttacctgtgctatcagtgcaataacgcatgatattattatcagaatgtacattggatcatagtaatatccatatccataataaccatataaagctaccataatacctcttttctgaaccatttaagattctgcttattctcctaacattacacctgcttctaactggttgcctcttaagaacgaaccactgtccattctcttcttaccttctaactgaacctcattaacaactaaatacccctgtccacaggctattgtaaatgtgttctttcctaccgtaacaacctgtcccggcttaacttcttctgtctgtacttcactgatattatctgcaacatctgcatcccatatctttaacattttaccgtctatataagtaaatgcactaggccatggattaagtcctcttataagtctttcaagttcagctgcactcttattgaaatccatcttaccaaatgacttatgaagcatttttacataagtgctttctgaatcatcctgcttaacaggagtaatagttccagcttcaagtccttcaagtgtcttaaccaaaagatgcgcaccgacatcacttaatctgtcaaaaagacttccgcccgtctctttagcatcaagcttcaccttttcaaccatcaggatatctcctgtatcaaggccttcatccatcttcatggttgtaacacctgaatactcacagccatcaataactgcccactggattggcgatgcacctctgtacttaggaagaagtgatgcatgaacattgatacagccgtatcttggcatgttaataatacttgccggcagtaactgtccaaatgcaacgacaacaattacatctgcattatatgttcttaattcttctacaaatgcttcatctcttgctctctccggctgtaaaactgtgattccatgcgccacagcttcctccttaactggagagaaaacaagtgatttgcttcttccccttggcttatcaggctgtgtaacaactgctgccacatcatgtcctgcttcgattattgctttaagtgtccctacagcaaaatcgggtgtacccataaatactactcgcattctgttccccttttcattaattattcttcttcaatgtcatctgtagagagaagctctccttctaccttatcaacatacattataccatcaagatggtcaatctcatgaagaaggcatcttgcaagaagctcctctccttctactataatctcttccatattctcattaagagccttaaccttggcataattaggtcttgtaacctcacctgtctttccaggtacactcaggcatccttcaagccctgtctgacttccgcttgtctctaatacaacaggattgataagaacaataggatcatctccacagtcaataacaacaagtctctttctgattccaacctgaggtgctgcaagacctacaccgttagcctcatacattgtatcaaacatatcatcaataagctcttcaattcttggtgtcatctctgtaatctcttttgccttggctcttagtatatcatctccaagtgttctaatatttcttattgccatatattcctcctcgcaatcatccattaatatcgtattgtacattaatattcttaaaagcctgatttccaacaatattaacatcaagcttttcatgtatactgttaagaacttccctgtctttatgttttacatagattatcttactatacacatctttaatcctatatataggtgcatctgccggacctatacacataagtcctttatacttacagttgttatccacaaatgctttaacccacgctgcactctttgtcaataacatctcatctggtgaagataacataatcttcataagattatccgccggcggatatccacacagctttctgtaagcaatttcctgctcgtagaaagcattataatcctgattagccgcactaacaatactaaaatgctccggcgtataagtctgtataactacattgccgcttttttctgctcttcctgcccttccagccgcctgtgtaagaagctggaaagttctctcagaagccctgtaatcactggaataaagtgacatgtctgccgcaagcactcccataagcgttacatttggaaaatcatgtcctttaacaatcatctgagttccaataagaatatccgcattaccattggcgaattccgacagaatcttttcatgtccatccttgcctcttgtagtgtccatatccattcttagcactctcgcctgtggaaatgttttcttaacctgtgcttcaacaccttctgttcctgccctgaagcccgaaacatatcttgaaccgcatgaaggacatacagttatcttaggtgttgtatatccgcagtaatgacacatcagccttccatcagcatgctccgtaagtgaaacatcacagtgcgggcatttcataacctttccgcatgaacggcatgatataaagccagccacgcctctcttattaaggaaaagcattatctgctcatgctttgcaagtctgtcactcatcagttctcttaacctgttgctgaatatcgtcctgtttccaagccttaattcttctctcagatcaacaatgtcaactgctggaagccctccgcttcccgcccggctgtcaagtgtaataagctgtatatgtccattcattgccgcatagtagctttccattgaaggagtcgcagaaccaagtatcactgaagcgcctgcttcctttgcaatatggcatgcaacctctcttgcatgatatcttggaacagtctctgacttataagctccttcatgctcttcatctattactataaggcctatatttgaaaatggtgtgaacaacgccgaacgcggtccaatcattacacttatatcacctctctgtgcccgcagaaactggtcataccgctctccctttgacatacgggaattcataatagataccttatccccgaatctgtggtaaaacctctgcacagtctgaaatgtaagtgcaatctccggtataagcacaattacctgtcttccatgattaaggacatgctcaattgtctcaagatacacctcagtctttccgcttcctgtaacaccatgaagcagatatgtcttataatcaccattatcatagtcagctattattgtatccacagcgtttttctgctgttcattaagttcgatacgctttctttctccggtaacatttcttacaggattcctatacatatcttctgacctgacttcggcaatccccatatcttcaaacgccttgaccgtctgtgccgtgatattaagcttggatttaataatactttcatctattacaggttccttaatcagtgcctctaacaatctgtatcttgcttttgcatttttctttgcaaatgtatcaagatacttctgtgcctgtgctacgtcaataataagattaaccgagtgtttttccttctgtttaaccttatcctttacaggaataaccgtcttaattgcctgattcatggtgcaaccataattgtgcttcagccacgccgcaagctttaacattctgcttactgcagtgacctttccctcagtaattcctgtaatatattttatcttttcaacaggatatgccgccttgtctcccaagcctacaacataccctgttatctgcctgtttcctgctccaaatggaatatcaactgacattcccagttcaattacatccaccaattcatccggaactgcatactggaatgtcttatcaagctgttcatgtgaaatgtctattattacatctgcgtacattaattacccttcaattcttcaagcacttctttgataagcaccctctcatccataggatacttcacacccttaatctcctgataatcctcatgacctttacccgcaagaacaataatatcacccggttcgccatgttctatcgcatacttaatagcttcttttctgtctgtaatatcaacatgctttccggtagtcttagcaattccagtcttgatatcttctataattgcctccggctcttcaaatcttggattatctgatgtgataatagtaaggtcagccagttttcctgaaacctcgcccatctcatatcttctttccttggagcggttaccaccacatccaaacaggcatacaagtctgtgagggtgatattccttaagagttgtaagtatactctctaaagccattgcattatgagcataatctatcattaatgtaaaatcatcagaaacctttacaagctcaattcttcccttaaccttaacgtgtttaagagtttccttaagtgcctcttcgtcaacatcgaaatgccttgtaattgcgattgcacataatgaattgtatacagaaaacttacccggaagattaagttcaaccttcatattaacaagtcctgtacagtcatatgtaagaccaattttacccggttcatgtaaaagttcaatattttcagccttaatatcagcattatctccgataccatagctttcaaccttacatattgctcccctaaggatatctttggtatgcttatcatcagcattaacaataccaaccttgcactgcttgaataactttgccttacagttaaggtaatcctcaaatgactcatgctcattaggtccgatatggtcgggctcaagattagtaaacactcctatatcgaacataatacctgctgttctgtcaagcttaagtccctgcgaagacacctccataacaactgccttacagccagcgtctaccatctttgcaaatgactggtgaatctctattgattcaggtgttgtattatgtgccggaatcgcttcatccccgataatagtctcaattgttccaataagtccagtcttaatgccgcatgcctcaagcacatttttaaccatataagtggttgttgtttttcccttagttcctgttattcctattgtaaacagcttcttatcaggattgccatatattgctgccgacataagtgcaagcgcaagccttgtgttatccgtgctaacaactgctgccttgcaatccttagcttcgtactcgccatcaagaacaacaattacagatgccttatccttaatctggtcaatatatttatgtccatcactcacagcacccttaatgcatacaaatgcatatccatcctgcatttttcttgaatcagatgtaattcctgtcacttgcgactcagtactgccgcatacaacactgtacctgaaatctgcagtttcattttctgaacatatttttaatatctctgaaagcttcatacattagtctccttattttatagtatatattacttacattactgctgctttagaagtgtttcaaactcttccattgtcatctcaacctttcttggcttagttccaagctccggtcctactacctttgcatcagcaagctggtccataattcgtcctgccctgttaaagccaatcttaaaatgtctctgcagacttcctattgagcctttttcattctcaataacgaatcttcctgcatcagcaaaaagtgaatctctctcatcatcgcctttactgctgccaggcatgctctcctgacttacagtagcctgtgcaatactctcatcataagatacttcctctgcattctccttaaggaaagatacaacattttcaacctcttcatcagatacgaatgcgccctgaacacgcagcggctttggaagattagatggaaagtagagcatatctccctttccaagcagcttctcagcaccattcatatcaatgataactcttgaatcaattcccgaagatactgcaaatgctatcttagacggaatatttgccttgataagtcctgttactacattaacagaaggtctctgcgttgctataaccatatgtattccggccgctctagcaagctgagccagacggcatattgcatcttcgacctcacccggtgcaaccatcataaggtcagcaagctcatctatgataataacaatctgtggaagcttctccattggagggtctatgccctccttattcttcttaacaacaacatcattatatccctttatattacgaacctgcattgccgcgaacttcttatatctgtctgtcatctcattaacagcccagttaagcgcccccgcagccttcttaggatcagttacaaccggtaataacagatgtggtattccattatatacacttaactcaacaaccttagggtcaaccattataagtcttacatcttccggctttgccttataaagaatactcataataattgtgttgatacataccgatttacctgaaccagtcgcacctgcaataagcatatgaggcatcttagcaatatcagcaataatagtctttcctgcaatatccttaccaacaccgaatgatattgctgactggctttccttgaattccttagactcaaccagttccctgaaatatacacttccggcttccttattaggaacttcaatacctatagctgccttgcccggaattggtgcttcaattcttatatcggcggctgccagattaagcttgatatcatctgataaagaaacaatcttgcttaccttgacaccctgttccggctgtaactcatatcttgtaactgtaggtccgcagcttatatcagttatagtaactttaacaccgaaagtaagcagtgtctcctgtaacctctgtgcagttactctgtattcagactttccaccagacgctgcacctggatttctctttaataagcttaccggtgggaacttgtatgctttcttaggtttattcacaggcttgacctgtacttcagtcttctgctcatcacttaactgttcactgccctgctgcccattattctggttcacactattttctctgtattcttcattagtcacatcattttcatatatattatcattatctgatacataatcattatcatatgatgaagtattatcctctggcatgtttccggtcacttcatcatcaaccatataatcatctggctgtatctgctgcatatgagactcatagtcagcatacactggctcatcagccacatttcctgctacacctgcattactatcgcaatcataagcaagctcaaatgcatcttcatcaggctcatagatatcctgtgtatactggtcattacgttcagtatcaacatgaatttcatgtatatcaatatcctgtgccagttcttcatccgttcctgttataagagtatcagatgttactccacggacaacattattcatacgtgcattggcaagatattcttctcttgctttcttttccgcaagctgcttttctttcttttcaatcttcttaagccttgccttagcacgctcttcttcccttaacctgcggtattcatcatcagacatgtcattctgtctgcctgctgaatgttctttgtatgctgaataatcctctcttgcttcctgcataatgcgctggctgccgtttccaaccttcttaagcccggatataaaagacctctccgtaattataaccagacatattattgcaagtatcataagtattacgaatgttccaattgaacctatagggctaagtaccttgcatagcaatccgccaaaaaatccgcccccggctttataatcagcacaatatgtaaatatacttcctaatccattatctgcaatatccggtttattatataaacactgaatcattgcacataatacaacaaacaatccatatcctgctgccgtcttaattctcgcgacacgaagcagttctctgtttaccataagaaagattatgcttactgcaagaattacaggaaatatgtattccataactccaaataagccaaacataagccatttaattcctcttcccaatgttcctgcaatattaaaattacttaataccattattattgcacaggcaattgaaaaaagaataatacaatcattcttcaactggtcggcctgtgtctggacatttttcttagtctgtttctttctcccctgagcagtcgtctttttcccttgagtattagtttttctgctttgactggtattctttctaccattattgctggctgtttttgccataaaccttcactccttcatatattcatcacgcatcatgatattataccatttatctaatctcaaggcaaataaatgtgcattctccaaaacacagaaaaagcggaatacacacataactgtgcatatcccgcctgtcatacatatgtatttaattactcatcaaatatacttacaatctcgccttccataatcttgttcatattctttactgcacagaaattaccacacatagaacatgtatcttccttctcaggcttagatgaagctctgtaagctcttgccttctcagggtcaatcgcaacgtcaaacattgcctcccagtcaagaacctttcttgccttgtccatcttataatcccaatctattgcacccggtacacctttcgcaatatcagccgcatgtgctgcaatcttagaagcaataattccttccttaacatcattaagatctggtaatcttaaatgttctgcaggtgttacatagcacaggaatgaagctccgtaagtagctgcgatagctccaccaattgctgctgtaatgtgatcatatcctggagctatatcagtaacaagaggtcctaatacatagaaaggtgctcccttgcatattgtctgctgaatctccatattagccttaatctggttaagaggcatatgtcctggtccttcaaccataacctggacatccttctcccatgctcttcttgtaagctcgccaagtgtaacaagttcttcaatctgtgagatatctgatgcatccataatacatcccggtctgcacgcatctccaagactcattgtaacatcatattcccggcatatctcaagcactctgtcataatattcaaagaacggattctcatttcctgtcatctccatccatgcatatatgatagaaccgcctcttgatacaatattcataagtctcttatctgctctgaacttcttagctgtagccttgttgataccacagtgtatagtcatgaaatcaacgccgtctttagcatgcatttctacaacatcaagccactcctgtgcagtgatatccttaagtgccttatgataatatacaactgcatcatatataggaactgttccaattgttgccggacattctgatgtcagctttcttctgaacttctgtgtatctccgaaagaagaaagatccatgatagcttccgcacccatctttacagcgttattaaccttgtcaagctccatatcaagatccacacagtctcttgaagttccaagattaacattaatcttagttcttaacttatttccgataccattagggtcaagacatttatgattcttattggcaggaattataacctgtcccttagctataagctgtcttaaactctcgacatctatattttctttctttgcaacaatttccatttctttagtaacaatgccttttcttgcagcatccatctgtgttgcgtattccatatgtattcctccattctgggtaattaacaggaaaaatcataagccttgtggaaattcgatattgaaacaatcaaatgaagagctaaaaagcccttttaagaatccctacggtggcattatccacatcaggttatgggtcggaacttaatccctctcagcagccactgcttacacagcccttatgctcccctgcaaatataatatgtgataagtataacaaatgtgttgtatttgtcaatcattcttattctcatcttgactctgttcgcagctcatacgcacagacagccgcacataagtgcggctgtccattgctgtttattaatcttcatcatcagaagctgcttctgcaaagccctgacgctttcttgccatctcatcgcttgcaagatactcatcgtatgttgttatcttatcaataagctgtccgcttggaacaatttccataatacggttagcggttgtctggatgaactggtgatcgtgtgatgtaaataatgtaacaccagggaacttaataagtccattattaagagctgtgattgactccatatcaaggtggttagtaggatcatcaaatactaatacattagctccacatatcatcatcttagagataagacatcttaccttctctcctcctgataacaccttaaccttcttaacaccgtcatctccagcaaaaagcattcttccgaggaatcctcttacataagtaggatccggatctggtgaatactgtgtaagccattcaacgatagtatcttctctgttaaactctgcagcactgtccttagggaaataagcctgtgaagttgtaacaccccatttgtagcttccctcatcaggttccatgttgcctgtaataatattgaaaagagtagttgttgcaagctcattagaaccaacaaatgctatcttatcatcatggtttacgataaatgatacattatcaagtaccttaacaccatcaatagtcttagaaattccttccactgtaagtacttcattaccaatctctcttgctggtctgaaatcaatatatggatactttctgcttgatggcttaatctcgtctaattcaatcttctcaagagctctctttcttgaagtagcctgcttagacttagaagcattggcagagaatctctggataaagtcctgtaattccttaatcttttcttccttcttcttattagcttccttcatctgcttgataatgagctgacttgactcataccagaaatcataattacctgcatagagctgaatcttcgcataatcaatatctgcaatctgtgtacatactttattaaggaagtatctgtcatgcgatacaacaataacagtattctcaaaattaataaggaattcttctaaccatgcaatcgcatcaagatcaaggtggttagtaggctcatctaaaagcagaatatcaggattaccaaataaagcctttgcaagaagaactttcaccttctcactaccgttaagctcagccattgtcttataatgaagatctgttccaattccaagtccgttaagaagctgtgcagcatctgattcagcctcccagccattcatatctgcaaactcagcctcaagctcacttgccttgttaccatcttcctctgtaaaatcttccttggcatatatagcttctttctctttcataatctggtaaagtctgtcattacccatgattactgtatcaagaacattatattcatcatacttgaagtgatcctgctctaagaaagataatctctgacccggtgtgattgaaacatcacccttgctaggttctatctgtcctgtaagaatttttaaaaatgttgactttccggcaccattcgcaccaataagtccataacagttaccttctgtgaacttaatgttaacatcttcaaaaagagccttcttaccgattctaagtgttacgttgttagcactaatcattaataatctcctccaaaaaatacgcataacagataataatctattataaaaataatcatacaaagttgattatagagattctggcacataaatgcaagcaaatattaataaaaagctatcctgctaacctcaggaccagtaatccatctgtacctttccggtatgaccgtaccattctgaatcattgcgactatgtttatatgtcccttttctttaaggctccgtaagatatccatataataaagtacattaatatccgtcatataactttctgacataacaataagcacattcttatattctcctataaaagcctcttcctcctctcttgaaaaaccgttcatatcctttcgcataatactccagaaatcttccagacagttacccattgacaagaaataacgttcaaatctgatacattctgtatctttcttgccaaacaaattaaatactaacattgtcccccaatcatgattattattccgactcacttattatatcagattgccatttttctgtgttatatatgtcgtcttctgtcgttttttcgttataacctgtaacttttccgtcacatttagatttactttttacagtatatagttcagtcctatattgcatatatcatgaggctgtacaacacatttgttcttatatactttcaagatacaccaaaaaggagatttccgtttttacagaaatctccccatcttaatatataattattcagaattacatattagtctcttctataaatctttcaagctgcttcttagctaatccgctcttaataatttctcttgccttctcaacaccttccttcattgtaataccatctgaagcaagatatatagcagcacctgcattaagaagtacaacatctgtcttaggcccttctgcaccatcaagaatatctcttgcaatcttggcattaactgccggctcaccaccaacaagatcttccttcttgcatcttgtaaatccaaaattctccggttttatagtatatgtcttgaactcatcacctttgaactcgcagacctttgtatcagcacttaaagatatctcatctatactgtccattccgtatattgtcatggctcttttgcagcctaaattatgtagtacatgagcaagcggctcaacaagttcctcactatacacaccaaaaagctgcatagaagctcctgcaggattagccaatggtccaagtatattgaataatgtacggattccaatttcctttctcacacctccaacaaatctcatagccggatgatatttctgtgcaaacagaaaacatatattaatatccttaagaatctgtgccatccttgccggagctgcatctatcttaacgccaagagcctctaaacagtctgctgtaccgcatttgcttgaggctgctctgttaccatgctttgcaaccggaattccagcggccgatactatgatagaagctaaggttgatatattaattgaattagaaccatctccacctgttccaacgatttcaagaacatccatatcatttaagaatttctcacagtgtgctcttaaaactctggctgctgctgtaatctcgtcaatagtctctccctttgctgccagagctgtaagaaatgctgccttctgtgcatcagtggcttctcctgacataatctcttccattacatcattcatctgcacagcagttaaatcttccttcttaaccagctttgcaatagcttctttaatcatattaccttagcctcctataaacatatctaaatgatagctttagtgtattactataacgccgtgctgtcaatccataacagcttacaaaggttatctgtctcaaacacatcatcaaaaagaaaagattcataaagtgcttccatattatcctctgagtactctacctgtcttgaaaaaatatgcaccgtatctattctgtcttcaaatgtaaacctcttatgctttctataccatacaagcatgtccatctgacggagtataagataattagtaacaaacattttagctttaccaaccacatcataatcatatacagcctttgcaaaatatctgaacacaagatacgttataaagtttctgtactcatactctctttcaagcattgctgtcatgaattcttctttggtctcctgatactgctcattatccatattgtcatggaaagtctctgtcatctcagataatatctgttcccagcgtgtactaagcacctccatatcctcatacggatacataatacttcttatacattcccaaacatcaacatcaccaaactcatcgctttctgattcatcattcatttccataagaatatgttctatatcacttcttccaaatgtattgacatactccttaagtgcgtcatactcatcattattaatatattcctgtattgatgcacaatattttaatattacaaccagcttctcattaattgacatctccggcatatcaagaatcttaaatatttcatctcttgccttgaatatcctgacagcgtaagcactgtcgtactcatcatcctctgaatattcctcatcacacggctttaacacagttgtaaatgttttgttttcagaaaatataattctttctgcttcctcacaagcaagcccgataccgctttccttgatttctccataatattcagaatatcttggaaactggtcacacactacagacaaatgctccgctcccagttctttatgaattgtacataatccacacttatctaacaaaccgcaatgtccatctacgagtttaaagcaattcgaaccatcttcacttttagtaattgattctcttatcctgtctccaagctcgccatcaagactcatataataattataagtatcatcatcaatatctatctcccagccgccaacacaacagttgtctttacattctgaagttatacagtggaactggtcataatagaatggaaccctgagtttcataatccttatcttctccttagtctgtaacgatatcagcaatctgatatcttataactttatctacatcagacagcttaacttctacctgatgtccgattttacctgcactaaacattatagtttcaaaatcctcagcagtcttatgaaatgttgtcggaaagaacttcttcattcctataggcgaacatccaccatgcacatatcctgtaagtggcagtaattcttttgatttaatcatctctattgatttctctccaacagccttcgctgctttcttcaaatccagttccttattaacaggaacaacaaatacataattcttacctgtcttgccaactgtaacaagtgtcttgaaagcctgttccggattctcattaagaacagcagctatttcatctccgcttaacccttctgcatctggacacacatgtgtcttataaggtacttttttctggtcaagcactctgcatacattagtcttatcatctgattttcccataattacattcctctggcaattctatatctgtctcattctctcaagtcgttcatgaagcttttttatatgtttcatctcagcctcactctccatttttctatccgaataataatattctactgtgccttttttccctttatcttcctctttaaatattccttttttcacaacagtattcttaagattattagatacacccgtatttccatcaaccatctctaaatcatccggaaacagctttgaaaatgaatccttaaaatagttaaaatgtgtacaccctagcacaagttcagaataatcattaagattgtatggagcaaattcagattttaaataatcagtaacatctgaagagtcaaaatcatcatcctgtgcaaatcttacaagcttaggaagtgccacaacgtcaacgatatgcttattatcatatttatctacaagtttctttaacttctcaccttttgccgtgacaggagttgatacaaccataactctttttcctgattcatgaatgtgctcaactgccggttttacagctggctctattccaattattggcagcttatacttttctcttagatatgagattgctgcacttgttgcagtattgcaggcaagcacaattgcctgacatcccttatcaacaagaaatccaacagcatggtcgacaagctttcttacttcttcttttgttttctccccatatggaacattatccacatcagcataaaatatgtaatccgcctctggcatgataatcattgcctgatgaagcactgaaagaccacctatgcctgagtcaaatattcctatcttcatattaccataaacctctatattctaatcattatatactttacaataaacgatcattttatcctttaatatcttaaccctgctaggtcttatctctccagcaaatatcttatctgcgaaacctgtaaacagatacttctgtaacagcaccttaagctgcttgttaccagatcttcttatagctgatacaatccatacagctacaaaacacaacggccatacccacactggaatatactgcataattgtaagtgcatatcttcctgcaagtacaaaccctattgcgcagaatataacaacatataccacagcccatatataagcctttacccagccgacagcaccaagcaccttaagtctgttagttatctttctgtaattctctgattcctctgctgttattgacaactctattatctccataaacaagtcatacctttcttagcatttaataataattataagccctcatgtcaaagtattcaagatactttcacttctccattttcatcatatcttataaaagctttccccgcatacgctgaaaatcaattcaccgcatacggggaaagcccttttactgatttcttctaaacagactgattaatagtcactcagaacatcttccacatgcttaatagaaatctctaaaaaattggatatttcataatctggaacaccattatcatgaagtatgaatataagttcttccatactcgttcccttacggcgttccatcataataaaatgtttaacctgagtctcgtccataccacacctcacatatcacacattattaaattattccgtatcgaaacttttcaacattatatcagatacatttctgattagtcaatagaatagccttacttactgattgttctttccaataatcttctttaacatatgtaccctgttaaatggaaatgaaaaataatacccatcaacaaaatctgtagtctttgcaattatttcccttgctatctgaataccggtctcctctccctcttcttttgacatatcagctctgtatcttgaaagaatctcatcagtaacattaatacctgtcatctcatttttcatgaatgttgcatttcgaagacttacaaatggcattattccacaaagaatccttgctcctgtctgttctttaatctgtctgagtctgtctatatcttcatcagaaaatacaggctgcgtcataaaaaatgtggctcccgcctccatttttttcttaacacgctcaagttccactttaaaattaacccttccctgattaattgctccaccatatataaccggttccccggcaaactgttcctgattcatatcacttattatattcataagtccaactgaatcgaagttaaacacactctttacagacgctcttacaactgatggtatgggatcaccggtaataacaagaaaattattaatgtcatttatatgtgctcccaaaagctgtgaacgcattgctatagcattcttgtcacgacagcatatgtgaggcataacacacatccccgtttctcttgaaaccttttctgccataagtattgaatctgcacgtgttcttcctgatggtgaatccggaaatgtaagcacatcaactccactttccttcatcaaaaaagcagcatccataatcttctcatcatcaattccaagcggaggagcaagttctacagcaatcagttttcttccttcttttcctttatagaaagaaacatcatttgcagttttcttttctgatatttcttcttctatggaagcatttttcatatgaacaacatcagcaatttttaaaaccatctgtcttatatattcaggtgttgttccacaacagccgccaataatatcagctccatcctcagccagatcatgcataatctgtgaaaaatatgctgcattgttatcatcaaataccattcgaccgcttacaacctgtggatatcctgcatttggaagcaccgcaaaatacttgtcgttcctgttaataaggctctgcacaagcttcttcatatgtcccggaccaactccgcagttaaatccacatgcatcaatatatgaatttttcccagcttcttcaatcagctttcttgcactaaagcctgcactgctatagccaaactgattgattgcaaactgagttataacaaatccgttttctcctgcattttcaattgctttatcaataaatcccagttctggaaatgtttcaaaaacaaatatatcaacgccacattccttaaaaacattaactatatcaacatactctttttcaatatgctctttttcaatcatattttcaccaggaataggaccaatatcagctgctacaagcacatctgtcccctttacggcttcccttgcaatgtcaacagcatttttaatattatttcttacctcatcaaatcccgctccaagacacacggtattacttgcaaatgtattagttctgataatcttagcaccagcttcaatatattctttatgaattgacagcactctgtctgaagcctgtaaatttgccagctccggcagacttccagtatcgtacttcttggcatagtatgttccaaatgcaccatctgccaccagtatctcactctttaatctgtcatataatattcctgctgttcctgtatacttcatgcccaatccccttatcttttaacattcaacctaaaaaaggagccaccttatataagtgactccaaaattgtatcattattaagtttaatttgcactaaaaattaaaggaaaatatacttcaatatgaacagcaatgcaagcacgtacataagtggagtaatcttcttagcctttccagcaacaagattaacaataacatacgaaataacaccaactgcaataccttctgaaatgctgtacataagcggcatacagataaggcagaggtaagctggtatactctctgttaaatcattaaaatcaatttcaacaaccgcactaaccataaggaatcctacaaaaataagtgccggagctgttgcaaatccaggaattgtagtaaatacaggtgcaaatataattgcaataaggaataagaaacctgttacaactgaagaaagtcctgttcttccgccttctgcaacacctgatgagctctcaacaaatgttgttgttgtagaagtaccaaggatggctcctgcacttgttgcgatagcatcagctaaaagagcctgcttaattctaggaagtcttccgttctcatcaagcattttagccttattggcaacaccaataagtgttccaagtgtatcaaacatgtcaacaaaaaggaatgagcacataataacaataaaatctaatatattaatattaagacccttaaggttaaagcactgtccaaatgtcaggctgatagctgtgatatcaaagcttctccatgaaggaataagtgaatagaatcctgctgccgcatcaaccttataaagtcctgtaagctggcagataataccaagcacccatgttgcaacgataccgataaggatagaacccttaacatgctttacataaagaatagctatgataaatgtaccgataactgcaagtaaagcacctattcctactgtgttaaaattagttctgaaattaacaacagtaacctttgttgactcacttgcaacaactaggttagcaccctgaagtccgataaatgccacaaaaagaccgatacctactgatacgcccttctttaatgttgtaggaattgcgttaaatatagcttcacgaacattagtaagtgaaagcacaataaatacaagtccttcaacaaatacagcaaaaagtgctactttccagctatatcccatgcttccgcatactgtatacgcaaaatatgcgttaagtccaagtcctggagcaagcgcaaaaggataattagcaaggaaagccattgcaaaacaacctatagcagatgctattgcagtcgccataagaattgcattagaatccattcctgatgctgacaggatagatggattaacagccagaatataagccattgtcataaatgttgtaattccagctacaacctcagttcttacactggtgttgttttccttaagtttgaacaatttgtccatttcaacctccataattttataaatattaaaaatacttaataatattaacatattcttctcaattttacgataacttttttattagacatatatcttttctaataaaatcccccactaaaagggggaagcacattcaatagcaaaatagtactatagcattgtactttagttacacacctgtgaattggacgtgaacacaggttttgggatacatccatttatgaaaaacatgaataaagccatatatgcagttgggagacctgcatatatggctttattttatttcttatctactaattctgttgtacagaaaggacatcttgttgccttaacagatatcttgctgaagcagtatggacaatcctttgtagttggagccggttcttctttcttcttacctaagctcatcatcttgttcattgctttaactaaaaggaacagaacaaatgccataataaggaagttaataactgctgttatgaatgaaccataatcaaacacaactcctcttattgtaaatgtaccaccaacagtaacgccttctccattagtgccacctgtaaccactgcaataagcggattaataaaactgcttgtaagtgctgttacaatgctctgaaatgcagcaccgataataacaccgactgccagattcataacatttcctttcaaagcaaattctttaaattcgtgaatgaattttttcattgtgttttcctcccgtatattattaatcttagaaacgattataatgtctttagttttttccttatgtcctctacagtttcaacaatataatctgctcctgccatctcaagctcctgttcttctgcaaagccatatcttactcccatagaatcaattccagaagctttagcacctaatatatcgtcttttctgtcaccaatcataatagactgtgactttgtttctgacagattgccagcgtccgcaagtccggcagcagcaagccttacaaacacttcatcaataacctggttcttatgtctgcgttctccaccttctaattcacttccaacagcaacatcaaaatacttatcaacatcaaagtactctaatattcttggaacatatatctcaggcttacatgtagcaagtgcaattatatatccatctctctttaatccttcaagcatatctgctattccgtcaaaaagaacattttcatatattcccttatcagaatatctttcacgataataatcgactgcctttagagctttttctttgtcaaatccatagaatttttcaaagctttcatcaagaggaggacctatgaatcttcgaagcatcgcctggtcattttcttctattccaagtttcttaagtgcatgctgcacacttttggtaattccctcgcttgaatctgtaattgttccatcaaggtcaaataatatatatctcttactcatattttctccattatcacattaattcactgtaacttctgatattgtaatcggctatccgacaaatatccggccagtcatcagctgaagcctcatcatatacagccacaacagtaaagccaccgctcttggctccctgtgcagccgacaatacatcttcaaacacaatacattcattcacactgcaccctgctttgccggctgctttcatatatacatccgggaatttctttcctctggatacttcatttgtctgtgtaaatgcatcaaagaaaccatatattccgttacgtcttaagcatggctcaaaaagtgccctgtctgatgatgttgccgaaacaatcttaagaccattattatgcatttgttctataaaagttttcgcatacggctttaacaccaccttgtcagtgtatgccttacatgctgcatcataccattctttcatgatttcttctgtagattccggcagattatacttttccttagtatataccgaaccggattcaaatgtatgtgtcttaatctcctgcatatattccttagatacaggaattcctcttctgcccagaaaatccatgtcgaccttagcccatacctgtgttgaatcaagtatagttccgtcaaggtcgaatatgatacaccggcagttactaagatctaacatggataactctcctccagatttatatactacttatatgaaaatctcttctttacattaacgctgtattcatcagtatatttcttgatatattcagaatatttctggttaagaagtgttgacttgattgcgtcatcatctgaaccatcatatgatctgcttatgtaatatacaatatagaaacatgtattatcatcatcttcaataactgtaaggtcgccctcttttctgtctgaagaagcaatccagtctgcacatgcttcctcaatattgctcttcttagtttctgtaactaaggaagctgcatcatccgcataagtatcatcgcctgcttctgcgaatttcctgcactggttaatgaaatcaagttcactgcttacgcctgacgcaaaagaattagctgtttctttagcatttgccatatctgacgaatctgaactttcagccttaactttaaacattctatattcaaacttatcatatgtatccttattgtcctcgtaatatgcactcacttctgaatctgatgccgcaagagtttctgttaacttctcctgatatgctgtactcttaagataatcttttaagaattccttaactctcttttctgtagctctcttaccaaacatctgcttaagataatctgaatatgatgtatcagctttattagccgcatccttaagcttacctataaactcatcataatctgcatcttcattgtcatatgtgaatccgttagcatctgcatcctttaataaagctttagtttctttaatagttgatactgcagaattagcaaagaaatcataccatgtataatctgttgaatattcctggctcttatctgactggcttgtcttatatcccatataagatgtgtaataatcaccatatgtcatagaaccatataaagttgtgttaagactgttagtcttagctattccataataaaaatcaaactcaatctggcttatcttatcattatctacttcaatataatcattataaatactgttaagcttaagcccaatagctgtgccgcttccaagtattacacctgcaagaaccgcaatacacacccatttagtaataaatcttctcttagcttcttttcttgcctcttcttttcttttctgcatcttacggtcgtatttagtaactaccttctctttatctgatgctgcgttattatcagtcataatgtcctccctattcatatccattaatttctttaattctgtctaactgcttcatccactcatgtgaacttgcatcacttggcattcttaaatcacctcttggcgatactgcaactgaaccgacctttggtccatccggcagacacgagcgcttaaactgctgcgcaaaaaatctccatgtgaacgttcttaaccacttatagatagtcttatcatcatattcccctgcaaatgcgtgctttgcaattctgaatatcttctcaggctctgcaccgaatcttaacatatgatacatgaaaaaatcatgcagctcatatggccctactaaatcctcagtcttctgtgcaatagtgccatcttccttaggaggaagaagttcaggactaaccggagtatcaagcacatcattaagtactgccgacaaatcttcattgccacaggtatcagcatagaattgcacaagatgtcttacaagtgtcttaggtactgatgcattaactccatacatagacatatggtcgccattgtatgttgcccatccaagtgccagttctgacatatcgcctgttccaatcaccatgccgttagtctggttggcaatatccataagtatctgtgttctctctcttgcctgaccattctcgtaagtcacattgtgattattctcatcatgtccgatatcttcaaaatgctgtcttacagccttcatgatattgatttcacggagtgaacagccaagttgcttagtaagcttgacagcattgttatatgttctgtctgttgtgccaaaacaaggcattgtaatacaatgaattccgcttctgtcaaagccgcacagatcaaatgcccttacagtcacaagaagtgccagtgtagagtcaagtccgcccgatattccaattactgcatttttacaattcgtatgttcaagtctcttcttgagtccatatgactggatattaagaatttcctcacatcttgaatctctttccttcttgtcagaaggtacaaaaggagctttatcaaaatatcttataagctctagttctttattgataagattctgtgcctgcacctctgtatatgtgctgttctcatcaactgcatatgtactcattcttcttcgctcagagcatattctctctacatcaatatcagcatataccgattcatcagcaaatttatgtgcctctgcaagtgtagaaccattctcacatataaggttatgtgctgagaacacaatatcctgggtagattctcctcctccagcacttgagtacacatatccgcacacaagtcttgcagactgccctgaaacaagctgtttcctatatgtatctttgccaatagtttcattgcttgccgatgcatttacaataatagttgcaccattcatagcatgctttatgcttggcggctgtggtgtccacagatcctcacatatctcaacgccaatcttaacttttctgttattatcaaatgtaaataataattcacttccaaagggaacctcttcaccatcaacatccacatatacacattcattaaatccaggtgtaaactgtcttctttcatagaattccccataattaggaagatacattttaggaaccatgccaagaatacatccattcataatacctgcaacaacattgtacagttttccgttcatttcatacggaagtccgacaaagtttatcatccctggtgttgtttcagaatatttcttaatatccacaagtccctgaatagccgcattaagaagtctgtcatgtaagaataaatcattacacgtataacctgtaatgcacatttctggaaaaacagctattgcagtatccttcttatgagcctcactcataagcaacttgatattctctatattatactcacagtcagccactttaatcttcggtgtcatggctgctgctcttatatatccgtctttcaatttgccctctctttcaatatatgtcttttcgtcaaacattaaaattatatcagactgggtatttatttacaataaaggtcacaaaaaagtcacttttgattatattgtccataaacaagtgttacaccgttttcctgctcttcaggctcattgcaccctgtcagtgctgatatcatgcttataataaccaccaaagccaataatcttgctgtcagctttttctttattccatcttctaacataaaaagacctccacttattcataaatctattatgaaccagtggaggttttattatactttaaatgtgcttattcaattacggctgcactaacctttattactctgtgtccagctaagagcttattctcaatcttatagaatgcaactaccttaagaggcttgccatctttagcaacaaactcctgtacatagcttacatatctcttatctatgaacttttctcttaactctgttattacttcctcatactcaacgcttggtacgaactgcttaaatacaattcccgcctcaaaatcatcttctgtgtatccaagaagctctttgaatccatcatcaatatcaataatcttaccgcttctcatctccatagaaaactgtgtaaaaggaattgctttcattacttctgccataattattctccttatccgtgaaaactacttagaaagtgttgcaagacgctcagttacctgctcaagcatctgtgtatattttaccagctttgccttctcttcgtcaatctttgcctgaggagcttttgatgtaaacctctcattgttaagcattccgttacatctcttgatttctccctgtaatctgccttcctctttcttaagtctctctatttccttgtcgatatcaacaagctctgcgaaaggaatatagataacagcatccggtataactgttgaaacagcatcctctggtattccagccttgtcagcctgaaccttaacctcgcttgcatatgcaagtgttccaaagaagccaagtgaattgttaaatatgttcttaacatcttcacttgctgtaacaacatatacaagtgccttacggctaggagcaacattcatatctgcacgaagatttcttatgttacgtacagcttccttgattgtctcaatagccttctcctctgctgcgaaattatcagcttcatcatatacaggccatgaagaaatcatgattgactcttcctcatcctgaatattgcagaatatttcttctgtaatgaatggcatatatgggtgaagcagcttaagtgcatctataagaacagtctttaatgtccagatagctgctgtctttgtctcgtctgcatcattgtaaagtcttggcttaaccatctcaatataccagtcacagaattcttcccagatgaagtcattaagcttggcaacagcgataccgagttcgtatttttccatgttatctgtaacttccttgataagtccattcatcttagaaagaatccacttatcagcatcagttaagttagcaggtctttcatctgtagccttaatcttgttatcagggtcattcatcatgataaatcttgaagcattccataccttattagcaaagttacggcttgcttcaactcttgaccagtagaaacgcatatcgttaccaggcgcatttccagtgataagagtatatcttaatgcatctgcaccatatttatcaataacctcaagaggatcaataccatttcctaatgacttactcatctttcttccctgatcatctcttacaagaccgtggaataataccttgccaaatggcttcctgcccatatgctcatagcctgagaatatcattctgattacccagaagaatataatatcatatcctgttacaagcacatctgtaggatagaagtaatcaagctcaggagtcttgtctggccagccaagtgttgagaatggccacaatgctgatgagaaccatgtatcaagtgtatctggatcctgttcaacattagtacttccacacttagggcatgtgcataccttatctcttgaaacagtcatttctccacaatctttgcagtagtatgcaggaattctgtgtccccaccagagctgtcttgaaatacaccagtctctgatattatctgtccagttgtaatatgtcttatccatagaagctgggataagttcaatatcaccattcttaacgccttcaacagcaggcttgataagctcgtccatcttaacgaaccactgctgcttaatcattggctcaacagttgtcttacatctgtcatgagtaccaacattgtgtgtatggtcttcaactcttactaaaagtccaagtgcatcaaggtcagctaccatagcctttcttgcttcatatctgtccatgcctgcatacttgccgccaagattattaattgtagcatcatcatttaaaatgttaatctctggtaaattatgtctcttaccaacctcgaaatcgttagggtcatgtgcaggagtaatcttaactacacctgttccgaattccttatcaacatatgggtcagcaataataggtattgttctgtctgtaagaggaagttcaacttcctttccaacaaggtctgtgtatctttcatcatcagggttaacagccagagctgaatctccaagtaatgtttctggtcttgttgttgcaatctcaacaaatcttcccggctctccaactacaggatagttgatatgccagaaatgtcctgcctgctcctcatgctcaacctctgcatctgatatagaagtattacataccggacaccagttaacaattcttgagcccttgtatataagtcctttctcgtagagctttataaatacttcctgaacagccttagaacagccttcatccatagtgaatctctctctgtcccagtcacatgaagaaccaatcttctttaactggcttgtgatagttccaccatattccttcttccattcccatgttctctttaagaagccctctcttccaagctcatgcttgtcaattccttcttccttaagagcattagtaaccttaacctcagttgagattgaagcatggtcagttccaggaatccagagagcttcataaccctgcattctcttgaatctgatgataatatcctgcatagtgttatcaagtgcatgacccatatgcagcttacctgtaatattaggtggtggcataacaatagtaaatggtttcttatctctgtttacttctgcatgaaaatacttcttttcaagccacttgtgatataatctgtcttcgatttcagacggattataattcttttccaattccttgctcattattaatctcctttttaatattgcattccgggttctttcccaattatgcgctcgcagctcatatgccagaatttcattctggcattgtcgcggtgctccttgagaacccatacaaagttctcagttcgtgcaagcacgactgcgaactttccatgacttctctccatcgctgttcgcgcaaaaaagccctttgcagggcatatactctgcaaagggcgtaaataaacttattaacgcggtaccacctttgtttaattatcttgtgataatcctcattactccttaacgcggaatacgtcacagcctacttaaatcaaccgttcagccatgcagctccaaagctaccttccatatcattattacctgaaccatcttccagccagtgaacggttctctctgtcggataaggatatgtactcctctttttcaatgcctttaaatataaaattcttttctatcttaatatctgacagaaaaaaatgcaagcattttattcaggaacttcaatctgcttaatattaaattcattgccctgaataagatatgtgtgcttactgccacaattcggacagactttggcgtatttcacagtctcataagtttccccgcagtcctcgcagtaagttatacccgggattatctcgacttccatctcacagtcctttacaagttcttctttcttgcaagcccacttccagcagtctgtaagatattcttctacaactcctgatacttcgccaagctcaattgtaactttagatatgcttgaaacatcattatctgaagctactgctttgaggtcatctattatgtgaaatactacgcctaattcatgcatacattttagtcctttttctttttgaatttaatcttgattgcctgctttgcaccatatggaagaatgtacttaagcttattctcacttcttctcattgtagagcactctggcaagtctctctgaagatgtatagcatcaaactcacactttgttgtacagataccacagcctacgcactggttctcatcaacgattgttgcaccacagcccaagcatcttgcagtttctttcttaacctgttcctctgtgaatacacctgcatcacttctgaatgacagcttatcaactcctgacttcttagctgggcgctgacggcctgtattgtcatacttctcaacgctgtaatcatccttatcaagttcaacataatagttaggatccctgcctattgtaagtgagctgtgtggctgtacatatctgtgaatagatatagccccctgcttacctgccgcaatagcatcaatagcaaatttaggacctgtatatacatcaccaccgacaaagatatccggctctgctgtctgatatgtaaccttgtcagcaacaggataattaccatgccagaattcaaccttagtaccctcaagaaggctgccccattcaattgcctgtccgacagacattatcacattgctgcattctattgtcatagtctcattctcatcgtactgtggattgaatcttccatcagcatccttaacagaagtacatttcttaaatacgatgcctgtaaccttgccatcttctgtaaggatttctttaggtccccagccaccaataatattgataccttctgattcagcagtctcaatttcttctggaagtgctggcataatgtctcttgtctcaagagatacctgtgaaaccttaggtgaaccacagcgtattgccgttctcgatacatcaatggcaacattaccaccgccaatgactactgtgtcacctgtaagcttatagctttcatcatcagttgtaatatggagaagctcaacaccagtcataactcccttagcatcttctccggcaacgccagtctttctaccgccctgacatccaactgcaacataaaacgctttatagccctgttcgcgaagctgtgcgattgtgatatccttacctacttcaacaccacattttatctcaacacccatagcccgtaatacatctatctctgcctgtacaatattcttctccataacaaatgaaggaataccatatacaaccataccgcctggttccttattcttctcgaatacagtcacattagtatagcctttctctgcaaggtaatatgcacatgaaataccagccggacctgcaccgataatcgcaaccttctcgtcaaaatatcccttagttgcaggaacaaccttttcaggaacatatcttgtttttgcattaatatctaacattgcgatatatttcttaacttcatcaatagcaattgactcatcaatagttccccttgtacatgcgtcttcacaacgcctgttacagacataaccacatattgcaggaagtggattgttcttcttgataagagcgagcgcatcctggtatcttccctgtgcagccatctttaaatagccctgtacagcaatgtgggctggacaggctgtcttacatggagctgttcctgactcatgtgtattgattctgttcttatccctgtagtcctctgaccacatgtgtctgccccacttctgttccgaaggaagcggcatcttaggatatgtaacctctgagccgtcctttctgcaaagcttctgtccaagagacaatgctcctgcaggacagtattcaacacagcgtccacatgcaacacagttctgcttgttgacatgtgcaacatatgctgaacgtgacatattaggggtattgaaaagctgtgatgtcctgagcgcataacagacattaacattacagttacatatagcaaatatcttatcttcaccatcaatattagttatctggtgaacaaatccgttatcctctgccttcttgaaaatttcaagcgcttcttccttagtgatgtatcttccacctttgccagtctcaacgacataatcagccatatcacctacagcaacacaccagtcagcaggatcatctgcacagccctcgtcaaatgtttttcttgatttacgacatgaacatgggcttgctgcatatttgccctcgtatttatcaagccagtatgaaatcttctcaagcgagatggcttcattacacatatcaacttccttctgtacaggaatgacatgcataccaacaccagcacctcctggtggaaccatatgtgtaagtccctcaagtggaatacggctcattcgctcaaagaatcttcccatctcaggatgttcctctaagacagcatcattcatattggcaaattccgcacttccaggaacaaacataggaagcacatactgtttctcgtgctttggattttcccagttatactcgattacaccattaaaagccatcttattaagaagctcctcaagatacttctcatccatacctgtaatcttaacaagttcaggaagtgtctttggcttacgcactcccatctttaatgcaacctcagccatctcatcagtacagattgctgcaagtccccagtactcagggtcatctgctgtgagcttctccaatccaagctttattgctgccctgtcagtaaccatctttccaagtttaaggattggttcccttacaggaagctcaggatgtggattcttaaattcaacattcttagtattctttgccataaatcatcctccgttatttattctttcctctggcaaatgccggattctttattaactgcacgataagcggaattaccataagaacccatacaataggttctgaaacaataactccccagtatcccatgaaaggaacaagtgtaaatgttataacaacctttcctgcaagctcaatcccacttgatatgataggcgtaagcctgtcacctattccctgcagtgaatttcttattatagttatcatcgctgtcacaaaataaagcagcgagtcaactcttaaatacagcgttgctgtatctattacatttctgttatccgaacttataagcattttaacaaatgcaggaactatcgtataagatgtgattacacataacacacaccatacccatcccataagaatagatgttaatatgccctttcttattctttcatactttcctgctccaagattctgtccacaaaaggttgccatcgtagttcccagcacaccgaacatcatcatgaaaagctctgataatcttcttgcagtagtatgggcaagaattatatcctgtccaaatgaattgattgcactctgcaatgtaacagagccaattgatacaagactgctcataaagcccatggaacagcctgttgacataagtttcccacgcagactggcatcagtcttgaaatctttcctgctaatccacaatatgtcatatctcttaagtgaatacacaagacaggctataagtgcaataaactgtgaaagcactgttgcaaccgctgcgccccttactcccataggtataaccttaaggaaaaataagtctcctccaatgttaagtacaactgatattcctaagaatatcaatggagtaaaagaatctcctattgaccttaacagggctgcacagacattgtacagcatgagtactgtcattcctgcaaatattataaatatataatcataggcttcctttaacaaatcatctggtgtattaaggactttaagaagaggtcgtaaaaatatcagcacaaccactgtcagacctgctgatatcataattccatatttgaacgatcctgcaactgtcctcttaaaattaactgtatctcctgccccaaagaactgtgcagcaataacagcaaacccattagtaagtccctgcaaaaagcctataacaagggtgttcactgaattggtagaacctaccgcagcaagtgaactttctcctaatacataacctataatcttcgtatcaacaagattataggtcatctgcaataacgagcctataaaaaccggtaatgcaaaccagaatataagcttagttatacttcccttagttaaatctttcatacaaatattcctatatagttcttaattctacctaattaatccactgataaaaatgcatccatctcttcagcaacttcatcaaaagtcttgttataaacagctgcaaattcaccatacaaaagcttccttgctgcaagcagcatcctgctgtctgctgacttcatctttcttaaatccttagctctctcgttcttaattacatataatgcacgaatcagatgcataagctttaaagcattctgagatttcatatgttcatcatactgcataggtgtaaccttttctgaaagttctccatctttcttacaatttctggctctttcctttaacttgtcacattccttaacagtcataatgcttcttatcataaccttgttgctgtcaacgggtgaatatataattcccttgctgtcaaataccggctgaagaaaataataatcccctgatattcccttaataggtggtgtatcaatattttcaacctcgcacactccaacaactccgtatactaccttatcaccaatctcaaacatgctctccgtacttccttccaattcttcgttaaatccgtatcaattattaatattatattacatttctaagattttttcaaagtatattttcactggaaattcgaaacaaaatctatctgtcatatgacataataaataaaaaacgtcgtttcaatgaatcactcatcaaaacgacgttccaaaatcaatcttgttattaattagaataaatctactcttcctgcaacctttccatcagcaacataatagcatgctccatcctgcggctttatgtataacttaatatccttagctgctactttctgtgccttaaggtcagcttcaactctctttaatacagcatccatatctgtctgctcatcgttatactggataaacgtctcagtcttaacttccttcttggcaacagccttcttagctgtagtcctaacggctgtcttcttagctgccactttctttgttgtagccttagctgcttccttaacagtctctttagcttcttcaactttagcttcaaccttagtctcagccttagctgctgctgtctcaactgccttcttggctgtttctgtcttagctgccgcttttttagcagtcttcttaacagttgtcttagcttctgctgcctttacctctgctgtctttacagcaccaccaaatacattgccatcctttttttcattgtttgccatgtttccatcctccttaataaaaatactactctccaataagaaacttcttgattgtttctacagctttatctgcatcattgccttctgctgaaatagtaacagacattccgtctcttaatccaaatgccataatccccattaagcttttagcattaatattcttaccttctgatgaaatatcaatatgactctcaaactgacaagcagtctgaacaagctcagcaattggattcttatgtactttatcaatgttagcaacgttgattgtctcagtcattacaaattacaccttactttcgtttaatttcagttacttttgtaaatataccctaatagtaaatataagtcaacatctgctttcgcaatttaattaataaactgttctcatttgattgtaagatttattgatttatcttcataaccctcattataaagttctctcatctgctcatcaaatatatcggaaggttcataatcacacaacaaaagaatcaatttttttatctgttcattttcagaagatagttttttatactgtggttctattttgtttttcaattccacaagattagcagcattttcctccttaggaattgccaacgcccctgacacaactccaagagcataggcacattcataattgccagtcattcttgcattagtaaatccgcatttgcgcgcaagcgcctgcttagctaatataggtaccattatgcattaagctccttcttaaatgttgcaacataatctgtggcagcttcctctgaataattattagcttcaagaagcttgataaaatgtgaaccgactattgcaccatcaataatatcttcaagtggagcaacatctgctgctgttcttattccgaatcccatcataactggaatcttagattctttcttaacttctgtaagatactctcttatctgtgaatggaagttagcacccttacctgtaacccccatctgtgaaacgcagtatacgaaacctcttgcattctctaaaagcattggaattctgcccttagatacaggagaaacaagctggataagaattggagtattctcgttctttgcaaggacatcctttatctgcccctgctcctcgaatggaaggtcagggataataagtccgtcaacaccattttcaatacatttgtttacgaagttctcaacaccgtaatgatatacagtattgtagtaaagcatgaatacaacagggctgttaagaccagcttttcttacttcacccatcattgtaaatgtgccttcaagtgaagctccattctggatagccttgtatgaagcatcctgaattacaggaccatctgcaataggatctgaaaatggaacacctatttccataatatcgattcctgccttctcctgtgcaaacataagcttcttagttgtatcataatccggaagtcctgctgttgtatatgtaataaatgctttcttgccctcttccttaagtgctgcgagtctttcttctattctattcattacttgttagtctcctctccgttaagatatttctgaactgtattaacatccttatcaccacggcctgaaagacacatgataattgtcttacccttatattcaccctgtgccatcttgaacacatgtgcaagtgcatgagcactctcaatagccggaataattccttccattctgcaaagttccataagtgcatccatacattctttatctgttacagaaacatattttgctcttccagaatctcttaaataagcatgttccggaccaacacccggataatcaagtcctgctgagatagaatgtgcaatctggatattaccaatttcatcctgtaaaagatatgtcttcattccgtgaaggacaccaatctgtccgagtgccattgctgatgcatgttttcctgtctcaattccaagacctcccgcctcaacaccaataaggtcaacgtctttatcattaatgaaatcagcaaacattccgattgaattagagccaccgccaacacaggcaacaactgcatcaggaagctttcctgtcttatcgagaatctgctttcttgcctcagtgctgataattctctggaattccttaaccatcttaggatatggatgtggtcctacagcagaaccaatgatgtaaaatgtatcctctgccctttcagcccatgttcttattgcttcattagtagcatcctttaatgttgcgcttcctgttgttacaggctgaacctttgctccaagcatttccattctgaatacattaagtttctgtctttcgatatcctcagcacccatgaaaactgtacactccatatcaaaaagtgctgcgcctgtagctgttgcaacgccatgctgtcctgcacctgtctcagcgataaccttagtcttgcccattctctttgcaagaagaatctgaccgataacattattaatcttatgtgctcctgtatggttcaaatcttctctcttaaggaagatatctgctccgtacttcttgcttattctctctgcataatacagtggagttgcccttccaacatattcctgcagataatatatataatccttagcgaactcagggtctcttattgcctcatcaaatgctttctcaagctctgccagagtattcataagtgactctgaaacatactgtcctccaaactgtccataatacttgcttcctgccattttctctttacctctttttcttaatattttgcattctgtataaatgctttaactttactctcatcttttcctttaacggacacatcatcatattcaacgcccgaacttatatcaacaacatcaggccttactgcttctatcgcagcttttacattgtctggtgtaagtcctcctgcaaggaataatttcttattaccacagtccgcttttttaagactttcccagtcgaatgtcttaccgctccccggaactcccgcatcaaaaagcagtccatatattttatccagacttcgccatcgcttagtctccagatatatatcttcctctgactgatgcttaatgttaacggctcttataatcccgacactgcatgcattatacacatcatcacttaattcaccgtgaatctgtatataatcaaatcccgcattctgtattgcttcaagctgtgatacatcgggggacacaacaacggcgactgtcttaatgtccgattttttcaatcttgtagcaagtgtttctgccagagtaatgtcaatattgcgtctgctttttggataatatagtaccatacctgcatagtcatcaccatatttttctataatgtgtacatcatccatacttgtaagtccgcatatcttaacctgtactaaagaatcattttctttcagcattatatacctctttaaactctgatattaattcttccggcttcggtgcttccataagcactgttcctataagaagtgcatctgctccactctttgccagcaccttaatatcgtctgtatccgcaacaccgctttctgatacaagcagttttccagcctttctcatctctggtgtaaccatatctgcaagttttttcgtagtatcaaggtcaacctcaaatgtcttaagattacggttgttaattcctataatcttcacatcaagattcagcattctctgcatttcctcttcgttatgaacctcgcataaaacatcaagtcctaaactgtaagcaaggtcatatagttctttaaatctactgtcatcaagaatcgcagcaatgagaagaactgcatccgctcctattacctttgcttcatacacctgatatggatcaattatgaaatcctttctgataatcggaaggtctgtcatctgtcttatctgcttaagatattctgtacttcccttaaaatggtcttcctctgtaagacatgaaatagcatctgcgctttcgccgtactgttttatcctttcttccagagtaatcttattgttcatattaccatgacttggtgatgctttcttgaactcacttataattgaaaggccgtcctttgcaagtgcatcatagaagctgtgtgacactctatggctctcaatcgcaagtcttgtcatctcttcttcgctgattcttttcttgtgttctggaagtctttttaacttatcctctacaataacatctaatatcattaaatcaccccattaacgaaattctcaatcattctcttgccatgctctgtatatattgactccggatggaactgcaatccgaccaccggataatccttatgttttacagccattatttctccatcctgtgtcttggcaataatctccaagcagtatggcaaagtcttttcaattatagcgagtgaatgatatcttgcaacctttactggtgaatcaagtccggtaaatattcctgttccatcatggtatatttcagactgtttaccatgcatgatacattttgcataagaaacagttgcgccaaatgcttctcctatgcactgatgtcccaaacatataccaagtatcggcttctttcctgtaaaatgctttattacatcaacacatattccagcatctttagggctcttaggaccaggagatacaactattgattcagggtcaagctcctctatctcctcaattgttatcttatcgtttcttacaaccttaatatcactgttaaatattccaataaactgatacaggttatatgtaaatgagtcataattatcaatcagcagaatcataaatgttcctccttaacaagtgtctttgcaagtgccattactttattgcagcactcctgatattccatctctggctttgaatcagcaacaattcctgcacctgcctgaagatataccttatcgcctttcttaatcatagtcctgattgtaatgcagaagttcatattaccgccaaaatcaaggtatcctgtagctcctccatacaggcctcttcttactgtctcaagctcatctatgatttccattgctcttatcttaggtgcgccgcttaatgtgcctgctggaaggaatgatgatacgaggtcaagtggatgatattctccattctttcttccctcaacaagtgaaacaatatgcataacatgtgaatatctctggatattcatgaactggtcaaccttgactgttcctatctcacttatcctacccatatcattacgtgcaaggtcaactaacatcacatgctcagctctctctttctcatctgcaagaagttcttcctctaaagcaatatcctgttcctttgttgctcctctttttcttgtgcccgctataggacatgtatatactttattgtctgactgctttacaatcatttccggtgaacttccgattatctcaaaatctccgaaattaaagtaatacatatatggtgaaggattaagttctcttaatttctcatagagattaaaaccgctctgtcccgtctttattgtccatctctgcgaaagaactgtctggaatatatgaccttcttttatgtaattcttaatcttattaaccttcttgctatattgttcaagcgtgtccgattttttcaatattacaccatcaagtgacatatcaggcttatcatccttaaacttatctacgccctctcttgcagtctttataagctcctccgcttcctttaaagccttaatcctgcctttctctgaatcctctccaagcactactgctgtgaatgtttctgctgtatgattgatagcaatgaacttgtctgcaaacataagctgtattgtctcaattcctatctcatcaggattatcatcaggaaggacttctgtgtatcttatataatcatatccaaggcttccaacaagacctccaaggaaatcaagttctcccggatcctttactatctcgaattcatcaaaatactctttaagtcttataagaggattgccctctcttacctctctgcttccatcttttcttgtaataacaaggctgtccttatctgattggattatctcatttggttcaactcccataaaagtatactgtccgctttccttgtcagttccttcaagaagaaatcccttcttttcaattccaagtcctttgtatagttcaatagctttctcattaacgatacttaccgtcttcttataagctcttaatcttcgtttcatagttcctccctatccttcgttgttcattactggcgcctgctgcttacaaaaaatgtccctgacaggaacctgtatattgcagattcctgtcagggacgaattaccgtggtgccacccttatttatgaacatacttgtaatattaataaaaaaggtggcactccttaccggatatgccacctgtatgctcaactcattatcagatacaattaatatatccttcccctataacgcgaggccgcgtcgtaaactactgctaattcatctacgcatctcacaaacccattccttacggctctccatgctgacattccaccaccgccagctctctgtgatgtaccttccgaaagtactcttttgatcatcgactttaaatatttaactgccacctataatagcactatgtttatctgccgtcaagcacaaaagcttaaaatttcctgatattaacaattgtctgaaccagatatactatgtataaaacaactgctacaaaaataagaaccgttgttgcatttgtaagtaccagtataatcacattcacagcaagaagaataactactcctaaaagtgtttttccaattgttcttttaaatactttaacgcttacaatatataccacaacaaggattatcagaataatcaaactcagaatcgaaagtgttctccaaaaagcatcaaactcttcctgtgtggtctgctgaatccttgcaattccactctgaataaaaaacatatataggtttatcatcatcaaaattaatgttactatttctaacaacacattctttataactttcatttcttaattcctccatattatatactcacaatttaagttcactctcaattgacacttacataagcctttccaatgccaataacattatgtaaaagccaacaagtgcaaaccacacaatactcagaatcatatatatggtctgttcatttcccataactccattatatggattatctttgttaacacgtatggtataaacagaacccctttcatgatacatcgaaaatatattcttttttacacggcaaacataattatgccctttgtatccataaataaactcagaagcgtattgatatttatagccattgccatttgcaactcctttagttttatagaaatgcttttttatgtataaaaatcgggcaaaaaaaa

SEQ ID NO: 8505 - DNA, 132258 bp, Unknown
  gut microbiota DNA sequence
aaatatcgcatctaattgctttttatacttttcaattttttgagttgcaattccaaattcaaaataataatagtgttgatcatcttttctgggcttatcccaataacatcgtgtaaaagaatatcccaaataatcaaatgtatcatccccatccaactttgtctgatatgatgtttttgcaggagaaaacttaattttccccccaaatattgacccacggcatttatcaacaactttatcaaggacctctcttttgaccctctgattaaatattaaaatacaatcatcaacatatcttttgtaaaataccaagccattctcagaaaacgcagcttttactctctcatcaaaatctcgggaaactatttcaatcaatgcgttagatgtcggcaggccttgaacgcaattcttatatttgttagcaatcttaagaattagttctttctcataagaatacaaattgctatgttctaaatactgattatatatactctttatatcaactgaatcaaaaaaatccttaaaatcaaatttatagattgtataattatctaaacgcggaagactatcaattaaattaaaactcaattccattatcttatctctattaggataagaaatattaaattcattattgagacgctttgacaagtagattaatgttgcttgatcaatagctttatttgcaatatatacttgacggcttttaccatccttcatgatatttaatgacttaattgaggagaaatcaacttccgatttttttattttatcaaaataaaaaaattctttccctttaagctcatcgtatgccaacctgtttatttctgaatcaaacgtattaatgacatctctaaaaactttgtcaactggatagtattcccatctaagtagatagtaattatccaccttaaagtcatcatcaataaaatgaagataacggcaactataaatggctccatatatattttgcaccagcttatctaataaatcagaatcatccgaagcaataatacgctttttcatcattgatatcattttatacttggaatgatttatgtactcatcgacattgcctctatcatatttctgtgacaatagtgaccccaaattgcttataatgtaactattcagaaccgatttgaaatccagcaattttccacatttttcaatttcccctagtcgttcaagcctctttaaagcatttttgtaccaaataagaaacgaataaagcaacattacacttggtgtaatagcatcattatacatttcaagaatggattcccttataatctcaattattgcttctttatctgatattccagaaatatcacatccatattcctcctttacaaaaataatgtgttcatcagatatattgtcacgagagtccattatccaacgtaaatccgcaatgtaattaatatcgtaatctttaatacttcttcctcgtaattcatttttcatttatcttcggtctccaaatatctataattaatctaaaccaatttaacaggcatatatgttctatttcttttcttgtcccattttacatgctcttctaagctcatctagcttacataattatttattcctgtaactgccatgttaacctacttacttttctgatatatatttactactttgttgttgcttatctgcttccaaattattatttatcaggagcaagtctcctttattataatccgaatttattttcatagctagtctcctttcaaatcatagttcttaccttttatatcgtaaaaaacagtttctatcgttaatcctttgcttcaaatgaccgtttttgcattctatatatgcaacaaaaaaggccttataacatatacaatatatattggcgtaattgtttcaattataaatccatccaaatttggtcaaaacaaaagaccgaacagattatctctgagcggtcttttgtcagttacactatttagttttgatggtcaagaacccactgcaataagtcttcatattctatttttcctgctgcaatatcaagaatcgtttcatataattctttttgagtatacttaagttcaatcccattcaaaacaagaaaaaccaacattgcatgagttccaatccttttatttccatctatcatgcaatgattttttatcaacccataccctaatctcgcggctttcgcttgaattgtaggatacaattcctcccctccaaaagactgaaaaggattttctaatgcagagtccaataaattgtaatctctgactccatcgcttccaccagtctgctgaatcaattgagtatgaagcataagaatctgctttttgctcagttttttcatttggctagtacctcatatgcttctttattctgctccatgagctgctttgaaatacttaacacatcttcatcagatgcagtaaaatccttatctgctttactaaagtctataacaagatatcttggtacattattcttcaaaatcactgctgaaccacattcgtccactaatcttgctactttagaaaaattctggttagcgtctgaaatagacaccattgtttttgtatctatagtcatttgatcacctccgtaatttgtttactatagtatacgcaaattttaggataaatacaacctatttcgttgtaaaaagaatagcagatacatgacaatcgccacacacctgcttttctgcattacacttctgaccaacttatggcagaaaaaatcaactttttaacactgataccgtatctgtaccgcatcactatcaaatttcttcacatcaattaattttaaccttgtcacatcatgctccatcgcaagtccgtcaaacactgacggcataccgcctctgccgtcaattccggctccgactaacaggctgatttcatcaagcaatcctgcttccagaaatgcagtattgatcttcggtccaccaacaatatccatacgctccacaccaaatttttctgcaagaatttccactgcacgagccagatctacatgctcctttccacaggcaatccatgaaatattctgcccatcgagataatccaaatattccttagataccttttcgctggttacaatcagatacggctttgccatgccagatgcatctggccagagaagctttccatttgtatctattataactttatagcctgtggcatctgctttcttggaaaagccttcttttccatagctttctgtattttgggcatggaattcgccagactctgccgctgactgtggttggtacattgatttcatccaatgtcgtgtaatagtcatcaacttcaggaagtttcgatgtcatggcacagtcaattctttcatctatagaaatcatcatatgacagataatatatggtttcttcatactgctctccattcttcacattatttataacaatttctatcatttattaatgctactatatatttcttttgtagttacatctttcctccatatacagggaagccgctgcttgcgccatagctctcaatctttttgaaattctttaatgtttccatatcccctgcactgattgtaaagtcaacctctgcgttgctttccatatgctctagattagctgtctttggcagagatattgcgccaagctgtaatgtataacggatgcaaagctgtggtacagttactccatatttgtcagcgattgctttgatttcaggctgatttaaaatctcaccatgcgcaataggtgaatatgcttcaactgcaatattgctcttctggcagaactcgatcaattctaatggtgtgttgctgatatgacagagtacctgatttaccataggttttacttttgatgtctccattaggctctcaagatcctcaatctggaaattggacacaccgattgctttgagtttgccttcgttatatgcatcctcaagttctttccatgcctgacgattgccctctttgtatctgttttcgctctgattcacctctacccatggctatggagagtgaataatcatcatgtcgagataatcaagtcccattttctttaatgtctcgtcaattcctgcttttgcttcctcgtatgttttgtgctctgcagcaacttttgatacgacaaaaagttcctctcttggcacgccacatgtgcggataccttcaccgacaccgcgctcattaccgtaagcctgcgctgtatcaatatgacggtagcccgttgcaacagcagccctaactgcatctgccgcgtccgcatcatcaataaaccatgttccaagtccaagctttggtatctccacaccgttgttcaatgtataatttttgctcaaaacactcatcagttcttatctaaacctttcaattaatcttctttccatacttccttagccattgtaatcctccattcctgccatataagacattatcctaatctgttatattcttcatcagttacaggctcacaccattcattacttgtattctcgcccggaatctctgcagcaatatgtgaaaaccagctgtccttcttagctccatgccagtgcttaacttctggtggaattgcgattacagttcccggaacaaggcttacaggcaccttgccctcttcctgataccagccctctccagctgtacatataagcatctgtcctccgccctttgttgcatgatggatatgccagttattacggcatcccggctcaaaagtcacatttgcaagaaaaagcccgcacttaggatcagtcagcggattcaggaaagaatcaccaataaaatactcagcatatgctgtattttcctgacctgttccgaaaacattctgcttttcaaaatcatccttatccataaatttcatgataataacacctcttctttcataaaaatgtaaattatttgatacctgtatgatacgacttaaagtcagctttaggacaagcggtttatgggattttatataaatttttgcacaaatgtgatgtctggccttacgctcttgtgcgccgacttgcgttttggactttctcctgcctcctctccacttcaaagtccattccgcagctccttctcactccttttggacttcctcacatctcccctcctcctcaaagtccaatcctcagctctttctcgctccttttggacttcctcctgcctcctctccacttcaaggtccaatcctccgctctttctcactccttttggacttccgcgtgcctcccctccgcctcaaagtccattccgccacgctcccgctccccaccacgcaaaaaaggcggattgcaaagcaatccgccagtctcattccgccaattctaatccgccagtccaattccactatttccatgccagtcatcagccaattccaccaagtaaagcacctgcaataagtgcaacaagtgaaagtgggacaaggacatatttgccaagtggtacaaaccactttccaataggcttatctgcacctgcattaacagcatcaacagcaaacttctttcctgcaacccagaagaacataattgctgcgagcattgcgccaagtgggcagatatagatagatactgcgtccatccagcctgatacaataccctgtattactagtgacacaacacagccagccactgcgataattccaacagatgcaacacggttaagcttaagcttctcctgaatagttgcaaccggagcttcatacagattaacaagtgagctcatgccggcaaacagaacacatacatagaatacaattcctacaatcttgccacccggcataccattaaatacatttacaagatagataaacataagtccgggaccacctgaagataactcggcaccgcctgctgccatacctggaataataacaaatgcagctaataaagcagcaatagtatcaaatactgcaacatttcttgcagaagaaacaacattttccttatcactaagatatgaaccatagataacagttccgttacctgcgatagacagtgagaagaacgcctgaccaaatgcatatatccagagctttatatcaagaagtcccttagggttaagtgtaaaaatgtatttataacctgcacttgaacctggaagtgtgaaaatgtatattccaagacctacaaacatgatgaaaagcaaaggcatcatgaccttgtttgctttctcaattccacctgcaataccaagtgccataataacagcagttacaaccattgcgattataagccacatattattgccaaatgcgcttgctgtacttccaaacataccaccaatagctgacatatcattgcccattgctgaaagctttccagaaaatgcaagataagtatatttgaatatccagccaacaactacagtgtatcccattgcaagagccagtgagccaagcacaggaataaaaccaattgcctcacctgcttttctctttcctgtacgcatctgcatacagtcgccaaatgctttaataggtccgcccttagtcgcacggccaagtgccatctcctcaataacacctgttgaacctatcaatattacaaataatacataaggtattaaaaatgtcataccaccccatgcagataccatatatggaaaacgccatatatttcccattcctactgccgaaccgatacaggcaagaataaaacctgtacggctcttaaagccatctctttccaattcaattccgttatttcccatagctttagttcctttcttcctcatattgctaatagcacatcacttgtctgtaccaaagtttcttcatgaacgctcatacgcaaaaaaggcaaaggcgccagaaaccctcccgggtcatggcgcctttgcctttgatgtctgtataatataccattgtgttattcctgtaaaatacatgttggttataaaaccataaccagaagcaatgattattcattatatcatttatatacttgtttaatatatatcattgtgatataattttcagtgctacccctcctatacctggtagagagaggaggtgcattatatggacatgtttatgtctttaattgtcactattatggctgagatagtttcatactatatctgcaaatggctggatagtgataatcacaggtagccagcctggggcttaagccacccttccacaacggaatagaaaaccccacgagaaagcagctcgtggggttttcgttcattatatgaacatgtttgtctttacaatggaattatatcacaccccattgtatattacaagtatattctctttttatttaattatgccatttaaacagtctgattcatgtgtaattctttagaatatctcctacataatccacatctgtgccagatacatcacaaccggcattgtaataattgaaaacagcgtcgacaggcagaccatacataccgcccgctcataattctgcccgaatttctgtgcaaatattgccgtactcgttccaaccggtgttgccgcagcaatcagtgttatcattccaatctgaccgtgtcccgccggtataatataaagcacaagcagtgtaagcatcggaattattataagcctgacaaacgatgccagatacagggacggattaagcagtaagtcacggatcctgacacatgacagataatatcccagtacaatcatggctgcaggtgtattaagtgccgcaactccagccatcgtgctgtttattacctctggcagtttaattcccgtaataaaaagaaacagtcctataacaagtgatattgtcacaggattgacgaataccttttttatatttatcatatccttgcggcgggttattatcacaattccatatgtccactgcaacagattaagaatacttgcaaatgatgcaacatagaatgccgcttcatttccaaataccgcagttacaagtggaattccgataaatcctgcgttacagaaagccgttccaaagttgtctatcggctttcgcattccatatattatatatgatacagctatcgccactgcaaatgcagctacagccagtaccgccgacataagaagtccatacagcttctccatcgtgaaatctgttatatagcttcttataattacacacggaataaccgcatacagcagaatattggccatatccttactgccatgttctgtaagcagacctgttttagacagaatcagtcccagaatcataagaataaacattataaatgtctgcgttaataatatttgtgttatcataatcgtaaatatcctgatttctatattatgttaattgtaatttttataaaatactacatacaagagaggtgcgaacatggaattatatcagctcaggcagtttcaggctgccgccagacacaagaatatgacccgcgctgccagtgaactgtgcatagcacagccggcattaagcaagacaatccacaagcttgaagaagaatttggcgcacagctttttatccgtaataaaaaagggctcgaatgtacccgtcagggagaaattctgcttgaatatgcagacagaatactggctctttcagaagatgctgcgcgtgctgtcagtgaaagtcttggcgatgcaggcgaaataaggctctgtctccgctcaagtgcagttcttgtcagcaatgtacttaaagattttatccatgagcactctcatgtcagcttttcaatatcttctgaaccaaaagggtgtgacctgctgattgactctgtctcatcagcttatgatattccagacaatgcacaccttcttatgacagaagaaatctgccttgccgtttcatcatcacatccacttgcccatacaggacacatatcagtagaacagatgatggacgagaaattcattgaccttgcagattccccatcctacgccggagtgttcaattcaatattcagtaaatgtaagaaaactcctcagatagcctactcttgcaatgattacatattacagggcaaactcataagtctcggtcttggagtatcatttgttgcctctgtaacatggacaagcagcagccttcctgaaaacataagcctgctgcatatagatgactgtccacatttcagaagcatttattatcagccgcttggctcattctgctcagaaaatcagcgaatcttcgagcaccagcttgaagaatatttcaaaaatttgaataattaatgcacctctaatggtgtgtcttcaccggccgcaaactgcacaacactcttaactgaagactcaaccatatcagacacagcctgatctgtgaaaaatgcaacatgaggtgtgacaatagtattctggaaagacttaagtatgatgtaatcgtgattaacaacaaggtcatcatacttacggtctgtacggataaattcatcctcaccctcacagcagtcagttccaactgaaccaatcttgccactctcaacagcctcaatcagatcctttgtatcaacaagcgcgccccttgccgcatttataagaataacgccatccttcatctttgcaattgaatctttattaatcatatgatatgtctcatcacttaagaaagtatgaagcgagataatatctgctctggcatacaattcatcaagagttacatactcaacattttcaaggtcttttgcagggtatgggtcatacgcaataatcttacagccaaatcctgaaagattcttaatcactgcctttccaattcttcctgttccgataatacctactgtcatattctgcatttcacgtccacatataggaccaagtgaataatctgctgtgtgtgaacgcatcattacatacaaagccttgcggatacacataagcataagcattactgtataattggcaactgaatatggcgaatatccgctgtgtgcaacacggattccaaggcgctttgctgcctcaaggtcaacactgttatatccgattgtcctgaaaccgatgtactttacaccctctgctgcaagcttttcaagaacaggtgctgacaagtcacacatgccatcgcacaccgacatagcctcacagcctttgacactttctatatcatctgctgtaaatccgctcctattaatctgtaattccaccttgtatacatttgcaaatgtatcaaaatactgtttttcatcttgacgaacactgaatgctgctatcttcataacttttcactcctcctacttaatccactcatatgtaagttttccaagaatttcgattcccttaacaatctgctcatcagaaggtgtcgaataattaagtctgaatccattagacttctggctctcatctgctaagaacgctgctcccggaactgagagaacacctctgttaatagcctcccttacaaatggtgcagaatccattccctctggcaggaatgccattacgaaaagtccgccctcagggtggccgaaggttactgaaggatggaattccttcttcatgcactccatcatgagattacatttgtgctcatacacctttcttgaatcctcaagatgtttgtcgaaatcatagttattaatatattcattacaaatgtactggaaaaggacagttgaatgtacatctgtgcattgctttgcaactgtaagcggtcctgtgagcgacttgttaaatacaagaaaacctagacggaatgcaggtgccattacctttgagaagcttcctgcatatataaccctgccctctgtatccatcgacttgatagttggcacattttcacctgcaaatcttaattcaccgtaaggattgtcctctaatattgcgatatcatatttgcagcaaagctcatatactttttttctcttttcaagagaagttgtaattcctgtaggattctggaaagatggaattgtgtataaaagctttgcatcaggattagcctttaaagcctcctcaagcgcatttatattcattccgtcctgctccattgggattcctacaagcttcgcaccgtaagaacggaatgtattaaggcagcctacaaatgcaggctcttcagtaagcacaacgtctccttcattaacaagtgccttagttgtaaggtccgcacactgctgtccgcctgatactatgaaaagctcattattctcgaaatcaaagccttccttcttctcaagatatttcttcatagtatcacgcaggggtgtataaccttcactcagtccatactgtaataaagaaacaggattctcgccaagtccctttgctgctatctcttctatttccctgcatgggaatgtctctgctgacggattgccaccaccaaaagatataatatccttgcttgctcctaacttaaaaagttctcgtatcatcgaaccatgtacacctgataaacgattagaaatctcgtattccatatatatttcctccttcaaatacttgctaatgcaaaaaaaaagccagaatcccctaaagacttccggctcctttgcccttgataaatgtatcatacccccatgtgtcattcctgtaaaatacatgttggttataaaatcataaatcatagcaatagttattattcgtattttttatatacttgtttattatatattgttatgatataatttctagtgctacccctcccatacctggtagagaaaggaggtggattgcttggatgcacttgtgtccttaattatctctatcttggcaaatatagcttcgtactatatctgcaaatggctggacagagataacagacggtagccagcctggggactaagccaccctgccagaacggaatagaaaaccccacgagtaaccggctcgtggggttttcgtagattgcttgaatgcactacttatatccaatgacattctatcacatgccatcagacattacaagtatattctttttcttttcaaacattacaaaattatcagacaacttttcacttatccccacacagtctcaccattaatataatcagtcataaaatatacaatcttattccaaagctcatactctacaatatgtcttgtttctttaattatcctgagacattttttaattacatcggatgaatcatcctctgtaagttctaacaactttttatatgttttatacccctcatttttctctttctctgtccatcttatttcctcggcatcctctattttattaagaaaaatatacataaataccggcatgtctttttcctgtctccattccatacatttatcctccataaaatacctgctttctgtccaacatcatttcaccatattcatatttaagctgaataatacatgactaactttaaatcaagtttaaattgaattaatacattctctgtgctactatttaagcataagagttaaacctaactttaggtcaacctaataatggtgaacattttgtgaattttattatcacatttgtaaaaaactaatatcaggtaagcatagcttacagaaagcaggtgtgttatgtacacaataggacaggtttcagaaatgtttaatcttcccgtttcaacattaagatattatgataaagagggattattcccttttatgcagcgtgcctctggaataagacagttctctgacacagaaattgctgctcttaagcttattgaatgtctcaaaaaatcaggtcttgaaatccgcgacatcaagcagtttatggaatggtgtcaggaaggcagcaggacttacgaactcagaaaacagctttttgagagacagaaggcggctgttgagaaagagatggagaagatgcaggaaactcttgatatgcttactttcaaatgtttctattacgagcaggcaatcaaagacggcaacgaggacggaatacattcaatgcttccagacaagctccccgccgatattcaggctgcctacgacaactcacacaaataattattatttgcttattatatttaacacaaaatatggaggctaatatatgttcaaatctttagaagttaaatatcctaagttttatcaggtattcagattcattatagttataattgcttccgtgctgtacgcatggaatttaagatgctttgccaaagtcgcagacctgctgccaggaggcttttcaggagtctccctgttatttcaggcaatcggactacgttttttttatatcagcatcccatttacaatattcaatgtggcacttaacattttccccgcctacattgcataccgctacatcggcaggaagtttaccatctactcaatcgtggtaattatactttccagtgtgcttgttgatatccttcctccatacatttttacagaagatatcctgcttataagcgtatttggcggaattatcaacggatttgcaataagcctgtgcctcaatgtcggcactaccacaggcggaaccgatttcataagcatttatttttctcatgttaaaggaatagacgcatggaactatattcttcttggtaatgttgtgattctgctcattgcaggcggactgtttggctggtcaatcgcgctctactcaataatataccagttctgtagcactcaggtaatccagttcatgtacaaacgctaccagaagatgacattattcatcatttctgacaaatccgaagaaatctatcacgccataaagaatacaaccaaccacgacgccacgcttttcaagggaatcggctgctacgaggaaaaagagcgcacgctcatatactccgtaatcaactccgaagcgaaacgtgagcttatcacattgatacgctcaattgacaagcacgcatttataaatgtggtaaaaaccgaagagcttgacggcagatttaacgatattccacatgattaatcagtacacagaatattcgcactcgtaccatattttagtcaaatttctccaataaactatagataatcaattaacatacactaaagaaatggagaggtgactatgattaaattaaataaaatcaaaaggaattgcgtggctgcagttattcttacaatgtgtcttatgactgcaggctgtgccagaaattcaacttcaactactactgcatcagacagccagactaccatcacttcaggcattactaaagaagacacagatgtaacacacgcagatgatgctgagaattacagagtctccattacaggtgatttcactgtgacatctgatacatcagacggagttacacagtcaggttctgtatacacaatcacaaaggctggtgaatatacagtagccggtcttttatcagaaggacagcttatcgttgacgcaggtgatgagaacgaggttactatcgtattgaacggaacatctatcacaggctcaagtggttcacctatatacgttaaaaatgcttccgaagtcaagattaaatcagaagagaactcatttaacgaagtaattgacaatcgtgccgaagctacagaagattcttctgatgacactggcaacgcagcaatctatgcaacatgcgatttaaaactcgtcggcaaaggagccttagttgtaacaggtaattacaataatggtatccaaagcaaggatgacctttctattaaaaatgtgattgttaaagttactgctgtgaacaacgcagtcaaaggcaacgatgccgttgatattgaatctggaaatataattgcaatctccgctaaaggcgatggcatcaagacttctaacagcagtatttctaacaagggcaaccagaatggaatcgttacaattactggtggtaacattgatatttatgcagcctgtgacggtatagacgcatcttacgtggcagatatatcaggtgatggtaacttaaacatttatacagatacttactctgaatatagtgaagaagttacttcgtcaggcagttcttcaggcacgtcttctgaccgggacagctctgctaacaagtctgcttctgccaatactgtttcttatgtggcaacttctgacactattgccaacgcacctggcggctttggtggcggcaacatgggtggcggcaacgctcctgatatgagtaacggcaacgctcccaatatgaacggcagctctgatagaaataaggccggcggcgaccgtccaggaatgcctggtgactttaatgaatccggtaattcttctggacagtcctactcaactaagggtattaaagcagaaagcgaaataaatatttcaggctttacaattaacataagttcgacagatgacggtatccatgccaactctgactcaggtgtacttgaaaccggtgaggacggcaaaggaactattgttataaacggtggtacaattacaatttcttcaggtgatgacggcatgcacgctgacaagcagcttgatgtcaatgatggttatattaatgtagtaacttcatacgaaggacttgaagccataactataaacttaaatggtggcaaaatatatgtatatgctactgatgatggcatcaatgcctgcacaggtgatggaaagacttctccaattgtcaatataactggtggatatatagatgtcacaactgcgtctggtgatactgatggtattgactctaacggaaactatgtacagaccggtggatttgtattagtcaagggcggcagttcatctggaaatgtatcaggatcaattgatgtagatggtaccgtaacgataactggtggaacatgcattgcactcggtggtgtatgcgaaacgcctgtaaactctgctaatgcttatgtattaagttcagtatccttcagctctggaagctattcacttaaagatgcttccggcaacgaagtaataagcttcactgttgacggaacatttggcaacggctggatatgctctgacactcttacaaccggcacaagctacacactctaccggggttcagactctattgcagactggactcaggaatctggaacaatgggagcttctggcactggcagcttcggcggcggtaaaatgggcggcatgggcggtcagaatggtggtaatacgcctgatatgaatggtcagaacggcggcttcggcggcggcagacgataagatacttcacatttactctccttattttcttaaaactgtcactggattttgatatgccccctgtctacttgacagggggcatatcatttttctggtggctgttttcatatatctccctatatcccgcatagcataaattcctaataaacctaccaaatcattatccaccattactttagtatgtcaattaaacatcttattttattaaattgtctttcaaaacccactaactatatacataatcataatttagtaggcattttcacggaagatttcatctttaagagcctctaattcagaaaaatccaggaaaaagacctactcaaaaagctattcacagctgtttcgtaggtttgctccctccgcatcaggttataattatctcaagcaaacctactcaatgacatattataggcataatagtaggtatatccatattattcatatatactcatatatattaactcattttatccttgccaatccctccccaatatgctacaatccatttatatttactttattgatttaaagcgttacgctttaaacttatgaagtagggattaatacatttaatatgggggtttttatgttaaaactggttattcttattatctactttgcggtgctgataggcattggcttatactgccgcaagcatgcaactgatgttaatggtttcgttctcggtggaagaagcgttggtccgtggctcaccgcatttgcatacggaacatcttatttctcggctgttgtattcgttggatacgcaggccagtttggctggaaatacggcattgccgcaacctgggctggtatcggcaacgcgattataggttcacttcttgcatgggtcgtacttggcagaagaacaagaattatgagccagcaccttgattcagcaaccatgccacagtatttcggaaagagattcggcagcaatccattaaaaatcggtgcttctgttataatattcatttttctgattccatacacagcttcactttacaatggactttcaagacttttcggtatggctttcaacattgattacagcgtctgtatcataatcatggcaacacttaccgcaatctatgtaattgccggcggttacatggctactgcaatcaatgatttcattcagggaattatcatgttattcggtatcgttgcagttattgctgccgtaatccactctaagggcggcttcatgtctgcactgcagggtcttgcaaatgtgtctgacccggcagtaagcgatactcccggtatatttgcttcatttttcggacctgacccattcaaccttttatgcgttgtaatccttacatcacttggaacatggggacttcctcagatggttcagaaattctatgccattgataatgaagcttctatacagaatggtactgtaatctcgacaatatttgcgcttatagtttcaggcggatgctattttctcggaggtttcggaagattattctctgaccagatagatgtcaaggctaacggcttcgactcaataattccaacaatgctttctaatttaagtcctgcgcttattgcattagttgtaattctcgtgttgtcagcttcaatgtctacactttcatcacttgtaatagcttcaagctcaacacttactattgacttcttaaaagataactttatcaagaacatgagtgaaaagaaacaggtattatacataagaattcttgttgttgtattcattgcgatatctgcaatacttgcacttatccagtacaagagttcagtaacatttattgcacagcttatgggaatatcttggggtgcacttgcaggttcattccttgcaccatttatgttctcgctttactctaagaaggtttccaaagcatcatgctgggcatgctttttattcagctcagtacttatgcttgctaacatcttcttcagagcaggcttcccaacatggctccagtcacctatcaactgcggtgcatttgcaatgtttgccggaatgattatcgttcctgtagtcagcctgttcacaccgaagccagataaagagcttgtcgacagcgcatttgcatgctacgaaaaagaaacagaagtgcctcagaagacagcacttggaaaatagtacaatcatatattaatatgttgcgttatcatacgccgtaggattatctggcagcagctatgtacgatttaaggcgaaccgtgtgggagttatgcagctatatactaaagattgctgcaagaaaactcgttcaagcgaagcgcgtttgttttcgcgcagcataataagctctgtatatagctgcatttactcccactaggtgtagccgccatgaggacatagctgctgccagataatcctacggcatatggtaattcacaacatatctaatatttatataccctttacaacaaaacctccttgtgctataacaaccaaagttataaaacacaaggaggttatttatggcatcaaagcttcacaacgccctcgctaagaagcttccggatatacagatgtccgaagccttcataaactgcgtattccttgccatgtccggtggacttcaggatgcatatacatattttacaagaaatgaagtattctccaacgcacagaccggtaatgtggttcttatgagtacacattttatgatgggtgaatggtatcagggattaaaatatcttctgccattcttagcatttggtcttggcgtattcgtaacagagcggattcagggcaaatataaaaatgccaccagacttcactggcggcaggcaatattacttattgaaattgttatcttaattgcagttggcttcatgccacactcaatggacatgtttgcaacaataatcgtatcgttctcatgtgctatgcaggtacaggcatttagaaaagtcaatggctattcctatgcaagcaccatgtgcatcggtaacttaagaagcggtacagacgcactttcagtatttgtgcgtactggcaataaaacatctcttaagaaagccggatattattttggcataatattattctttgcaatcggcgcaggtatcggtggaaacctttcaatgctgttcggaatccacacaatatggatttcaagtgcactgctttcaatcagcgtacttcttatgtttgcggagaaattaaaaatataatgtaaatgattccttatcatagtcataacacattctaacataaaaccccaatccgtggcatagattgtataaatgaaacttccggagtcccgacatgcgagactatatagaagaacgtgccacccagctggcatattacataattgagcataaagccactgtaagacagacagccaaagtatttaatgtaagcaaaagcactgcacataaagatgtaactgcacgacttatggaaatcaatcctgaactagccagagaagtcagaaaggttcttgatgtcaataaacaagaaagacacatccgcggaggtatggctactaaagaaaaatacctccacgcatgtgccagatagtttttataaaattgcagaaactgtgagtcctcgtgtcttggataggtctataaactcatcttcacactggacaattggcagactgagtgcattctcattaataagaacaacctttccaattcttccatctgaaagtctcacatcgttattaatatacgatgatgccacattctttaagaaaggaagaatatattcaggttcaaactttgtaaatgcatctttatacattgtatctattacttcaaaaggacataatgctcctctatatactcttgctgaagtcattgcatcatacacatcagcaattgctataatcttggctactgctggaatatgatccgactttaagccaaatggataccctgttccatcacatttttcatgatggagcaggcatgcctctttaattcgtatatcaatgttctgattcttaactttctcatatccaaagttaacatgctgcttcattatattgtattcagcaactgtcagcttaccaggttttgtaagaatttcgttaggaatcataatcttacctatgtcatgaagaagtccgcttattgtcagtattcttatatctttctcactaaacttaagccattgcccaagaattgaagctatcaaagcaacatttacactatgaacatatgtaaggtcatcaaactgcctcatactgtgcaacatatcaaaaagctgtaaactatttctgttcgcagaaagaatctcattagttccttctatcagcttatctatatcaataggactgttattcgtaacaacatcgttaaggtctcctttgatatccagaatattctcatcataggtctttttaaaatgcttaaaccttatgctcgctcttatcttatcaaaatacttaacgttctctttattagcagtttttcccagaaccttttccagatcctgcagttcattattggtgtcgtatacctttacttccagtatatgatgccctgaaatatttgctattatatcataattaagtatggtatctttctttgctaatatattaccatctggcgtatgtacatcatctgcgagtttatcaccttcctgtgcgtcaaatatgaatatcgtcttatctgtcattactcattcccccagtattcacgatacatttgtctgtacaaatgtattttaattataaatttctatatagaaaatgtcaatttactcttgacgaatgtttaaatattgtgtagtatcttatgcggtaatattaattgaatattttatatcccttattaagagcggtggagatacataggatctatgaagcccggcaaccccttttgaggaaggtgccaacctgagcgatattagtcgaacaataagaggatttcgatacagtctatcgggtcccttatcggggacctttttttgcgagcagcggtaacattgcagttctggcattttgctacaagcacgagtaacgataagaatagacacgataaggtatgggatagacatattcacgataaaatcaaaaggagataacatggaaaaaagattatttacttcagaatcagtaacagaaggacatcctgataagatctgcgaccagatttcagatgccgtattagacgctctctatgagcaggatccatactcaagagtagcctgcgaaactcttactaacacaggttttattatggtaatgggcgaggttacaactaaggctaacatagatattccttctatcgtaagaaagacagttacagatatcggttatgacagctctgataagggatttgatggtaatacctgtgctgttatggttgcattagacaagcagtcagctgatattgctatgggtgttgataaggcacttgaagcaaaggatggcgagattgatgattcagaaggtggtgccggcgatcagggtatgatgtttggttacgcaactaacgaaactcctgaattcatgccttactcttctgcacttgcgcaaaagctttctaagcagcttacaaaggttcgtaaagatggaactctttcttacttaagaccagacggaaagactcaggtaacagttgaatatgatgaaaacaaaaagccaataagacttgatgctatcgttgtttcatcacagcatgctcctgaagtatctcaggaacagattcatgaggatattaagaaatatgttattgatgcaatcgttgatcctgctatgattgacgctgacactaagatatacatcaatccaacaggccgttttgtaattggtggacctaatggagattcaggtcttacaggtcgtaagattatagttgatacttacggtggagctgccagacatggtggtggtgctttctctggtaaggactgcaccaaggttgaccgttctgctgcatacgctgcaagatatgttgctaagaatattgtagctgccggacttgctgacagatgcgagattcagctttcatatgcaatcggtgttgcaagaccaacatctatcatggttgatacatttggcacaggaaagcttgatgaagaaaaaatcgttgaaatcatccgtgagaactttgatttaagacctaacggaatcattaagatgcttgacttaagaagacctatctataagcagacagctgcttatggtcactttggacgtacagaccttaaccttccttgggagaagcttgacaaggcagatgtacttgctaagtatcttggttaattattagcaattatatataatgctgaatttaaatggcggtcagataaccagtaaatcttctggttatttgaccgctacttttgtcatctttatatcggaatttggtcagcctttctgccgtcatcactggcgaaaacccactaaaagcttgaaatcactcaatttagtatgttgttttttcatcttttgacataatatcttttacaaaacccactaaattaataatacttcaccctttagtatgtctttttcatgcttcatctttacatccagccggtgaatcattataaattccttaaaaagacctacacaatctggctcgtgccattatttagtaggtatcctcaacaaatttatttacttttaaaatgacaaagacctactcagatactaactaacgccatctgagtaggtctttgttaaattatgatattgaaatcagccatttcgcaccactctgctactatcgcatccagcatcagctcacatcttcacgtcatcacaccttcttcagccacttcttccgctccatgcgtacaaggaatatcgcacccctgaagcaaagctctgccgccatcgctatccacacaccaacaagtccgtaacttccaacaagaaggaatgaaagaacaacccgaacagcccagagactgaagaaattcataagacttgaaacaagagtatctcctgctccacgaagcactccggtaacaacaattgatgctccatacagtggttctgctaatgcttcaattcttagtatccttactccaagctctcttactaccgggtcaggtgtaagaattccaatcataaacggtgcaaatataaacatcagaagtccggtgaacgccattattcccattccgaaagcaactgaaattcttccaaaagacaatgcaagctttcctctgcctgcaccgatactctgtccaacaagtgctgttgcagcctcctcaattccgtaagccggcatataacacaggctttcagcagttattgcaaatgcattggcagccacagccacaactcctaacggtgcaacaattcttgttatcgtaatcatagctccgaacataactacattttcaaatgttacaggaagcgataaaacaaatgacttctttattgtcgcaagacctgccttctcatcagaatctgttccgtaacccttagaaagcatcggtgttctgaacatcaatacataaaacataataattgtagtgacaatctctgccgccgttgttccaagtgctgcacccataactccaagaccaaatccaaaaccatgccaactgaatatgaatataaaattgaatataatatcaagtaaacagttcatggaattaagaattcccggtgttttcgtattgccgcagctctgtaacattctcgtaccaagacggttaaatcctaatgccggcatagacaatgatgttataagaaaatacattgtcgcgtccttgtgtatcgactcttctccaccaagccatgctggaagcccccagcttatcatggctccggcagcaccaataataattgatataagaagaacaattccaaatgactgtaagaacactcttcttgccctgttaaacttctttgccccgacaagctgtgccacctgaattgaaaatccaagtgacggtgcagaagcaaggcttccaagcagccatgtcgttgtcgatacaagacctattgaagccgaacagcctgctcccagtcttccaaccatagacgcatcaatatattgcattataattgatgacacctgtgccagaatcgtaggcagactcagcataattacaagtcttatcttctgttcaaatgtaatctctttattatttcttatataggaaagtgtatcttccttcatttaacattacccttctacaatatttttagcatgctcaagagctgcatcaatatttgcacagaaattatctcttccaatctcatccgcaaagcctgcatgctccataactgacataggctgttcattaacatgtgaaagaatcataacagcaccatgtcttttacataccgcatgaatatttcttaaagatctgagagcagtaacatccattgcaggaacacctctcattcttacaataactgccttagaacctgatactgtctggatatcaaggaatttgtccgcagctgcaaagaacattggtccattaatctcatatacaagtgtatccctaggaacctgcttaagattaatactgtcaggatcattattctcatctatattatcaccaatatatttccagctcttaacctcagtaacatcagccattctcttaaggaaaagaagtgctgtaagcacaacaccaacttcaatagcaacaacaaggtcaaatacaatagtaagtactgctgttgtaagaagaactagaatatcgctcttaggtgaagtcttgcacagagaaatcatttctctccagccactcatgttataagctaccatgaaaagaatcgctgcaattgccggcattggaatccatgctgcatatggcataagcacaacaaggataagaagaagtgttacagaatgcaccataccagcaattggtgtacgtccaccattcttaacattagctgctgttctcgcaatagcacctgttgccggaatcccaccaaatagagctgacacaagattacctgcaccctgcgcaacgagttccatattaggcttatgtctgcttccaatcataccatcagaaacaacgcatgataaaagtgactcaatacctgcaagtaccgcaattgtaaatgcatccggcaaaagattcttaaccattgttatattaacatgtggtatgctgatacccggcagcttgcttgaaattgtatataaatctccaatagtcttagcctgcattccaagtttaaccataattacagaaactataacagcaattaaagatgctggaatcttctctaacctcttgaatctaggccatattataagaattgcaagtgaaacaccacctacaacaagagcctgccagttaaatgtgttaatacatttaaacactgcatttaacttatcaagtgtctcaatagttagtccagtatatgcagaagtatcaagacctaagaaatccttaatctgtcctacaagaatagtaactgctataccaaatgtaaatccagttgtaattgtataaggaataaatctgataagattaccaaatttaagaaatcccatgataataagaatgataccagccataattgttgcaacaataaggccatccattccgttctgtgccacaattcctgcaacaatagttgcaaatgcggctgttggtccggcaatctgaaccctgcttccgccaaggaatgaaataacaaaaccagcaaatatagctgtgtagataccctgctcaggacctactcctgatgcaagcgcaagtgcgatagataatggtaacgctatgattgcaacgataatacctgcaataacatcattaacaaactgcttcttagaatagcctttcataacatcaaaaagctttggtacgaattgattcattgttttccccttaagtggttttaccacatttctcatattattaatagtgcagaatctgcctgctcatatatgtaaatcccattttaatgcggaaataataagaataaataaggctgcacacccattaaaagctgtgcaaccttagtcctgtcaaacattaaatattaacttaatcacgaattactctgctgtatctgttgtatcgttaaccgtaacattctcacacacaaaatcaactatcttctgataaagaacctgatatccaatctctgaattcatagtcttgccataagtatcaagaatatcattatagtcatcataaccataatatgaagcaagctcctcacctgttgaattaatatcatctgcagtaacagtgatattgttatcagcagctatcatagttacaatcatcttctgtaaaagatactgctttgcgtaattatctgcatactcgttaaatgcatcaagtgaatcaaacttatatgcattcttaagatactcctccttagaagagtatgctgagctatatgactgatattctgcatctacgttactgttaagagtatttaataaatctgtaagttcttcacttggataatctgaaacgtcaagtccatcagacatctgtttataagcagcatcaaatatagcacttgaacggcttgatgaagcctgtgtctcaaggtaagaccttacatatgttcttaactgctcaactgttgcaactgaactatcctcaattcctaatgaagctgcattagctgcaacccactcatctgtaagttctggaacaactgactcatcaatttcattaacagttactgtgaatactgttgtctttcctgcaagatctgaattataataactctctgggaatacacatgtaatatcagtctcctgacctactgtaagtcccacaagtcccttatcaagatcatcaatgaattttcctgaaccaattgtgtaagtaacgtctgtagcagttcctcctgaaaatgctgttccgtcaagcttaccactgtaatcaagcttaataacatctcctgacttagttgttccctctgttataacattagttgtagcctttgattcaagcatgctcttgatataatcctcaacatctgaatcaagaacaacataatctgactccttaagatcaacagacattcccttccaatctgaaagattaacaaatgtcttatatacttctgcattagatgtaattgttcctgcatactcttctgcatttatctctgtgttagctgtagaagctttagcttctttcttttctgttttaccacatgctactaatgatgctgcaagtgcacctacaagtaacacactaaataacttctttttcatatacttcctcatttctacatacataaacatttctgcctaacagcaagccttatatttatagcacatttatcaaaaaaataaaagtaatttcacactaatttcacttttttatacagcgttaaactgttataatctcaatgtgttaaaatattttggaggatgccggtttattccggtaattgttctatgaagaaatttaataaaataaaatgcttttcatatgtgtttactgttattctggctcttggctttgttcttaccgcctgtgaaaagcctgtggttacactgactactccagagtctgtgaacggctttaagttaaacacatatgtgcagattgactcatacacaagtgtttctaagaatactcttacagaagcccttaatctgtgtgactactacgaaaacattttttcaaggactaaggaagacagcgagttatcaaaggttaattctaaccagacaacaagcatatctaaggaaatgtatgaattagtaagtgccggacttgaatatgctgctttgagtaatggagcatttgacataacaataggaagcgtttccagactgtgggacttcaccgcggaatcaccgaaagttcctgacagcggacgtattgccgaagctttgacacatgttgattacaccagagtcagtgtgtccgataacggtgatggtacttattcaattagcaagcctgatgatgtcatccttgacctcggagctgttgctaaaggctatattgccgacaaaatcaaagattttcttgaagaaaatggtgtaaaacgtgctataatcaatctcggtggcaatgttttatgtatcggtaagaaaactaacacagataacttcggaattggcgtaaggaagccatttgcagccaataatgaagtgcttgttgctctttccgttgatgattcctctgttgtatcatctggcaactatgagcggtatttctatgctgatgatggaacattttatcatcatatacttaacccggctacaggctattcttatgacaatgacctgtctgatgttactattctgtcaaaagattcgctcaccggagactgcttaagtacaacctgcttctgtcttgggcttgaagacggtatgaagcttatcgaaagccttgatggaattgaagctgtatttgtgactaatgaaggtgaaattcactattccagtggagcaaaggcctatgtaaagagctgatttacctcgcggtacaaggcttaacttaatatcaaaaatgaaatggagaacatacaatgataagacttatattaatagttatatttgcaataataatattgtttgccagccttataatgcttcctgtattctggcttattggcaagtttaatcaggatgctaaggatcgcggaagtctccgctttgtgcagggtgtttttaaggttgttctttttctgtctggtgttacaacaactgtaaaaggacttgaaaacctccctaaagacggagaagctgtactttttgtaggcaatcaccatggtttcttcgacacaattatttcttacacatacatgaaacccagaactggctttgttgccaagaaagagattgaaaaagtccctcttcttaatatatggatgaaatatctttactgccttttccttgacagaaagaatatgaaagaaggtttaaagactatccttaccggtattgattaccttaaagctggaacttcaattgttatattccctgaaggaacaagaaataaaagcattgatggtgttcttcctttccatgcaggaagctttaagcttgctgaaaaatcaggctgcaggattattcctatggtacagaacaacacagctgctgcattagaagaccaccttccattctttaaaaagactcacactgtccttgaatttggcaagccaatcgatgtcgccagcatggaccgcgagcagaaaaaaactcttgccaatgatgtgcaggatcttattgagaagatgtatgaggaaaacaaggcgcttgtataatgtgaacggacggtcacaacaagaataaggtgtggttttcagacacgctcccgctcgtggaaacgcgtagcggtactaggctcgctgcctcacttcgtgaggtgcgcttgccaagtgccgacgcgtttccaacgatctgaaaatcacaccttattcttgttatgaccttacacttcgcttaatctacagacgcttgtttcctgccaaaactttgcaggggcaggtggcggaacctcatatatgttttttaccaccatagtattcaatccgcacatcctgcgccacgcgcagcagtgcggcaacgctggtaattgattttctaccggaagtagtgggctgtgactggggtgtatgtcgtttccagaccgtttaaaatgcgtcggtacttagcaaacgcacctcacgcagtgaggaagtgcgcttagtatccgctacgcattttaacgagcgggagcgtgtctgcaaacgacatataccacagccacagccctccctcacgtcagaaaaaaagaccacaccagcaatccgctgatgcagccctctcatccttacttattcttcttaaaaaatcccttctttttcttttcaggaactacaatctttccacctcttacagacttgatgcctacaatatagataccacttacttctgccttgacttctgccttaattggaatctggtcaaataccttaggatcacacataagtgacataactcttggtccaatctttgccttaactattggcatcttacgacctctgaatgccttaggtgtctggtctaagaccatcttaggaagtccggcatctttcatcttcatcatcttcttatcaatgacaagcatcgacataacctgctttgcagcctctaactgtgcgttattagcttcctgcttcttctgaagctttttacccacaatagtaagtgcaacaagtgctgctataagtacagcaataactatcaataaaacaatactccaaactggcatatttactactccttcgttaacttttcatatactattcaattatatcaaaacaatcagtaattgcaagtgttttgtgttggacttgggtcggagtatatgggtatatgtcatttccagacacgctcccgctcgtgaaagtgcgtagcggacactaagttcactgcctcacttcgtgaggtgtgttcactaagtgccgacgcacttccaacggtctgaaaataacatatccccacacactccgaccacctccccacaaactcttgcttggtgcctttggcaccatcgctctctgcggaaatctctctcgccagccccgcctccgcccaaggcggacagtggaagtgacagcgtaagggggcagggtgtgcatatgctgtagcgtaagaccgttggaaagacgtcggcacttggcaaacgcacctcacgaagtgaggcagtgcgcctagtaccgctacgcctttccacgagcgggagcgtgtcttacgatgtagcatatacacaccctgcccccgtccgtctgccactttcctctagtcagtcaacttatgaagaagtgacatcttcatatcataatatgccgggctcatatcaagataatggttatgaggattctcaaatctctgctcttcttcccatatattatcagtgagctgatcctgaacatacttcttaatctcatcaatagatactctgtccattacacgcttgccgttctttacaacaagctgctgtaactctactgctgtgcagttttcaaagtatctgttcttccaaggctttacagggtctacatagcggtaaggctttgaaaggtcaacaacctcatcagcacctgctataaggtctgctattgcctttttattctcgtcatatattctgtaaaccttcttaagacctgggtttgttatcttctcgacattttcagaaatcttaattcttggctggaatactccattctcctctactgctgcaatcttgtatacagctccaaatactggatcggactttgctgttataagtctctcacctacaccaaagctgtcaatgcagccgccctgctctaagattgacataatagtccattcatcaagactgttggaaacaactatcttacagtcagtaagaccagcatcatcaagcattttccttaccctcttagataggtatgcaaggtcaccactgtcaagacggatgcccttaagacgcttgcccattggctcaagcacttcctttgcacatctgatggcattaggaatacctgatttaacaacatcataagtatctacaagaagcacagttgcatccgggtaattctctgcataatgcttaaatgcttcaaattcatcacgatagaacattacccagctgtgtgccattgttccactgattggaatattaaacatctgaccggcaagaacagtagctgttccaaccgcacctccgatgtaagctgctcttgcaccatatactgctgcatccatgttatgtgcacgtcttgcaccaaaatctgatacagcacgtcccttagctgaacgcacaattcttcttgtcttggttgcaataagtgactggtggttaacctgaagaagaattgcagtttcaacaagctgtgcatcaagtaatggtgcaacaacagtgattacaggttcattaggatacataatagttccttccggaaatgaataaatatctcccctgaacttaaattcagcaaggtatgcaaggaattcttccccaaaaagcccctgacctcttaagtattcaatatcatcttcatcaaaatgcagattctcaatatattcaataatctgttcaagacctgcaaatatagcatatccggcattatcaggattctttctgtagaacacatcaaatgcaacctttctttccttgtcctcatccttaaaataaccattagccattgtaagttcataaaaatccattaccattgtaagatttctctcatcaaactgtttcttcataactactcctttttcaaagaaaaatgtactattcatcaattctaagttctctggttgttatcgttatctgcatatcacaatctgaaagatgttcacagtttacttccattccatacacaagatatatacttattgtatcctcagttcgttcaatttcaagactttttgttataatacccaggctcatatttccataaggtgtctggtaataagtcatattcttactgcccatggtaaacctcatcttcgtagatacaacgcctttctttgtcacctctacgctgtcaccatcaatcttaattatgctgcttgaccgttcctgcgaatcgtcatatacttcctcataacgtatatattccttgccattgacaaccgagtatgtgccaacatttataacttcaacctcatcgtcctgtgactcaattacttcagcctcttcaccatcaaacgaagcctcctcgtccattgttcccgtatataatcctttaatcttaataaagaccttatccttattattcaatcgtccttcctccactgactgcttataatccaagcagttcatttataaatgttaaatatttaaatctgactttacagcccctgtctgttactgtcttatattcttcgtctgtaagaactcctgcaagcttttccttagaaccctctggaactacgccatacaccgcatctacaaaacataatggcggatacagcacacaccaccagttctttccctctgcatcacctatatcaaccctgaaagcctcatagtatcctgctggaaatgtaacatcaccataagatttaactggaaaataacttttctcaaaatacacgcttacatcttccataaatccattatcccgtaaggttttaatagcaacatttcttatattatctctttctgcctctaatatggctcttgactctgaaagagaatctgactcagaaagagccggtcttatgtaatcaactactgcttccttaaccttaagcttaacctcctggtcttcctgagaatcactgttggccctcacatggaatcttataatactctcagatatgccttctgtaactgcctctaaatttcctgcataagacactctgtaataaccaaccagtccactgacagctattataacaataagcagaattccaagtttctttttaatgttcatatgatatttaccccctgatatatcttcatatctgggattatatccatatatttccataataaacaggaatttacaaactaacaaaggctggcatattcagccagcctccgtgtaatctaaagattatttgttaagaagtctgataatacccttctcctgattagtaatatgctgtcttatgacaatcttagtattctcttcatctttcttagaaagcttatcaatgatgtctttatgttcgctgataagaatagaatgtgctcttgcatccttaacatattccagcctgtatctgtacatctgctctcttagattattaataatctgaataagtctctgattatctgtcattgcatatataatatcatggaaattcacatcagcatctacaattgcaaccacatccttagatataattgctgcctcgaatctcttatttgccatcttaagctcttcaatatgctcctgagtaacattgcggcatgcaagtgttgctgcaagctcctcaagtgctgctcttacctcaagaacatctctcatgtccttctctgttatatgggcaacctctgctccctttcttggaatcattataacaagtccctccagctcaagctttctgattgcctctcttataggagttctgctcactccaagcttatcggcgagttgaatttccataagtctttcccccggttccatctcaccacgaagaattgcctgtcttaaagtattaaaaaccacatctcttaatgggagatagtcattaacatccatcttaagttcacctttcatataaaaccttgcctttctctattactctgaatgtgtattatttccatatatattatggtgtaaatgtttccgttgtatacacctgccttgcctcgcccttctgtcttaagaactgctgacaggctatcattgattgttcatctggaaatattccaaaaactgtcggtccgctgccactcatcatggcattcattgcaccatgttctatcatatccttcttaatgctgtcaataacaggatacaacggcactgtaactgactctaaaacatttcccattcttgaagcaacaagtgcaacatcctttaacttgatagcctctattattccatctatatctggatgcagcttaacatctgtgttgtccagtttctcatacacaagcttagttgatacatttacaggaggctttgctataagaatatgacaaaatggcatatccggaagccttgtaagcttctctccaattccttcagctaatgctgttcctctcataagacagtatggaacatctgccccaatctcaacaccaagcttcataagctctctcattggaacattaagttcgaaaagcctgttcattccaaataatgcacatgcggcatcacttgaacctccagccattcctgccgcaaccggaatgaatttattaagatcaacctcaattccaccatccagcttatacttattcttcataagcataattgccttataaacaagattattctcattcacagggagaaatcctatattagtcttaattcttatctcttcctccggaatccttgtcattataatacggtcatacaaaccaaccgtctgcattaccattcttacatcatgatatccgttctcgcgtcttccaataacatcaagtccaagattaatcttggctcttgcctttaatctgatactttccatatattacctaaccttgtatacaaaatccattttcaaaactattatattaaagatattgtatgaaatcaagtacaatatttaaaatgcacttttaaaaagtttcattcttacggtacttatgtggagatatcccctttgctttcctgaaagcatcaccaaaataattactgtcattaaagccacattcaaatgcaatatcagtaattgatttatttgtttcaagcagcagattgcaggcgttctgaattcttacattaataatgtactccttaaatccaaatccggttgctgtcttaaatttctttgaaagatatgacctgctaagattaaatttatctgcaacatactctaaagacagattatctgcataatgttcatatatatatgtggcaacctcctgaataatcctgttatccacatcaatttctttaataacattttcctcataattcttacagcggataataaacagcagaagttctattagcccaacctttataaatgccggcgacagttcatctggagaatcattttcaaatagcagtttatcaagcagggcaacaacataatctcttctcttttcaggaatattaacaactcccggcttcatgcagttttccataagctctttaccagtctggttctgaatccattcagttgcttcatttctaaagcttataacaattctttcgtgcattccttttccattataagttgtcctgtgaagacagccgcttggaacaataacaagatcaccctttccgaacttataaatgttgtggtcaataaagcttgtacactctccgctcgaaagatagaatatctcattaaacggatgcacatgtgcccctacccctgtactacaactgatattacttctttttatcctcttaatatcaaaatccttcgacatatcctgaaacatataacaactccttatctcaaacacactttcgtctattatagtaatttttctgtattataaagaatattttttcgtttaattgtagaaatcactgttttttatgcttatattatgtataaaggattttgaaatgtcaacaaaaaatcagtattttgattatttttctgtatttaaagaaacattttcaacacattaattaatataagggggcttatcatggcaaaaccaataagtgaagataaaagaaatatgattcttaatggtaatctctttcgtgcaattctcatgcttgcgattcctgttatgattaatagttttatccagtcaatgtacaatcttacagatactttctggcttggaaagataggtactgagaaccagtcggctatcacgcttgtttcacctttccagaatatcctgattaatttcggtaacggcataacaaccgcaggtgcaatccttatatcacagtacctcggtgcaagagaggatgaacaggctaattcaatggctaaccacatctgccttacttcacttgcattttcagtattatgcgcacttatatgctggattgtctctccgggacttgtgaaatggctcggtgctgaaggaagtatatataaatacggacttacatacataagaattgtagtacttgacctgccttttctgtttaccattaacctcttcacatcagtcagacagtctcagggcgacacagtaaaaccaatgcttcttaatatgtttggcgttgttattaatcttatattagacccattattccttatggttttcaaatggggtattggtggtgctgctcttgcaactctcattgccaaaatcccatgtgcagtgattgcacttattgtacttacaagacctgaacagcttataagaattaatttcagaggatttcagtttgataaaagcaagatgggttcgattgtaaaaatcggacttccaacagcaatcggcggaagcactatgcagcttggtttccttcttatgactaaaaatgttaatgcttacggatttattgcaacaagtgcatatggtatcggaaacaagataaacagcattattacaatgcctgcaaatggtatcggctccgccatatctactatcgttgggcaaaatgtaggtgccggtcagaaagacagagcagacaaggcttaccattacgcactccgtatgggagcaatgttcctgttattcttcggcttgattctgtcaagaagatttatttcacaggctatggtaacatttttctcaactgatgaaagagttattccgctggcaacagatttcctctcacttatggcattctggtgctggagcaacgcattttacaatgtcactcagggactttttcagggaagcggacacaccatgataaccatgattgtcgacgcttcaagaatctggatattccgtctgctgaccctctgggtatgtgcaaatgtgcttaatatgggggtagcatctatatggtacgccgttgttatcagtaatggaacttctgccgccatactttatggtctctactggacaggaatatggaagaaatccactataaaaatcgaaaaaaagaaggttaattaaagaaatacatttaccgatatacactatagaaacattacaataaaagtccaaggagggatataatgtcattaaacggagttaattcaaattatcaggcttacgaaacaaatactgcttctggttctgataagaaggtttcaactaaagagatttctaagactacagcttattcagatgtagcggcaacttatgaacatacttcacagtctgaaggtttagtaacggctgttaacaaaaaagcttctaacgcttctattgttgcacagttaaaggctgacctggatacacgcatgtcccagatgcaaagtctcgttactaagatgttctctaaacagggaataactattggaactgccgatgatatgtggaaggcacttgctggcggtaacttcacagcagacgctgacactattgcacaggctaaggaagatatttctgaaaacggttactggggtgttaaacagacatctgaaagaatcttctcatttgcacaggcactcgcaggtgatgatgaagaaaagatgactaagatgaaagaagcatttgaaaaaggttttaaagaagccactaaaacatggggcaaggaactccctgatatttcccagaacacaagagatgctgttcttaaaaaattcgacgattactttgccggcaagaattcataaccagacataaaaagaggtacagactttacagactgtacctctttttatgtctatgccttcacaagaagaagcttggtaccccgtggtataatcacagactctgacagtccatcagcacatttaggattacttgcctttattgaatctgctgttgtatgatacattttagatacatcccataatgttttagtgccatcagcaatatacccggtcattgacggcatctttgacagatcacatttttcttctgacatataagcactttttatgctgctatactcaaagtttctaaaaacaattacatccagtgaaactgatgatttaacctctattacaccagcactgtttattgtggctgaaagctgctgtactgacggctttatgttgtattcaagtgaatccggactgacaccgtcaatcttaactgtacctgcaaatggaataattgtatgcacactgccaagcggctgactgtcacttgaagttatgtaaaatacatttgcacttacaacaccttccgcaaccagctctccttctttatatgtcacatcgtcaagctgcaccgtagctgtacagttgcatatctgcataaggtcagcataattctcgagctggagattgcctgaaacacggcttgatacattatttcgtacaacaaggcaacgcagctgtgtatctgcattctctatttccatatcatatgaaggtgagtatatatctgctataacatccttctttcgctcctcatatgcttttacatccatatcaagaaccacttcaactgcaatatcacggttttcaccatctaagtcaggccgttcctcaactgtctttccaattatctgaaaattaacatatggaatcatatctgcattgcagccacttatatccagacttccttcaaatgatgctgttgtctcgtaccattgcacatttcctgtttctccatttcctatatacattacaaatatatctaaatcacccgcaagcttaagtccatcatctgcaagccttgtattcagattccttacatctacatcatcccagattatttcctgtatctctggttttccagccggaagtgatacattttctcttattctgaaattatcgcgctgattaactgcaagctgcacaaattccaattcttccttcaactgctgaatgtccgtattctccgtctcctctactcccgttatcatctgtatatcctgcaaactctcgcatatgagtttaagggtaactatagccttgacacttatttttcttgaattaattgctttaatactaagatcttctattgatgcctgacatgtaacataatcacctgtacagtcacccgaaagattgacattttcagaaaaactcattttccctgccatttttaccggctgcattctttctgagtcagatgatgcccctatataaagaagtgaaaattttaattccccatcaactgtagctttatccttatttacctttacactgtcggtctggacatttccccattctttcactataagttcaatatcatcttttgtgtccggcacattaaaatcatcatcaagcgtaatctgtgccactgtattacatttcaaacgatattcatgaatattttctgttctgagtctcacagactgacctcctatacattctacattttaaaaacaacgctttcttcacgtctctccatcttaagcactattaccggatatgtctcaacctcatttacagcttcccccgctgccggacctatcagattaagatcaatgtacagtgcattatctcctgtgtatacatcatttaccttaattgaatatccacttgtttcccttgttccataaccggccacaacatatgtataatccttagtcgtatatgtaagcctcatcactttatcttttttgctttcaataagcttcttaagctcttccggaaggtctgcattttcaaccactgtataatcaacactggtcttattatctggctctttgctgccagaacaccctgtcatggcacaagcaggcataattattaacaatgccaacacaaacgtcatgatttttccccataattttccacacataaaaaacacccccacaataagacctaattaatcttatgtggaggtacaaaaaatattcatataaagttattgtttatgttcactcaccatatgaacacgcacgctcccagtgtccgtctgtggcttacactttcagtattcctgcgcttagtatgagtaaatgccgctatctacaaagtttattacagtgtgcgaaagcaaacgcacttcgtttgaacgagctttcacacactgaacttatgtatatagcggcatttactcctacacagctcgtcataattcaagcgtaagccacagacagacactgggagctggttgtacatatgccgaatgagtgtaaataatagatagtaagattttttaaaccttacactgcgtatcccttactctttataacttctattacctgatctacatacttctcgcactcttctgtgcttcctgcctcaaccattacacggacaacaggctctgttccgctttcgcgtacgaggattcttccatctgcgccaagtgcattggcaactgcctcaactgcagccttaacatctgcatcatcctgtgcctgtgtcttatctgtaaccctgatgttcttaagaacctgtggatatataacaagtggtgctgcaagctctgacaatgtcttcttctttgcaagcataacctccatcatcttaagggctgtgataattccatcacctgttgttgcatatttagagaatataatgtgtcctgactgctctccacctatacggtagccgttctctgacatacactcatatacatacttatcgccaaccttagtcttttcgtactcaattcctactgcatcaaatgctttgtaaagtccgaagttagacattactgttgttacaaccttgtttccgacaagcttatctctgtccttcatataacatccataaatatagagaatatggtcacctgttatgacctcgcccttctcatctacacacagacatctgtcagcatcaccgtcaaacgcaaatcctacatcaagatgctctcttcttactaaatcctgaagtccttcaatatgtgtagaaccgcagtttgcattaatattagttccgtccggagcagcatttataacatatgtcttagctccaagtgcgtcaaatacagcttttgcaagtgtccatgcactaccattagaagcatcgagacctactcttattcctttgaatgaataaattgcaagactcataagatatcccatatatctgttacgacctgctgtgtaatcaactgtacatccaatgttttctcgtgttgcatatggaatttctccaagctcaccatcaaggtacttctcgatttcagcgataacatcctctttcatcttctcacctgcggcattaataagcttaattccattgtcatagaaaggattgtgacttgcagaaatcataattccgcaatcaaaatcttctgttcttgcaacataagaaacacttggtgtagttgtaacatgaagaagatacgcgtctgctcctgatgctgtaagaccggctaccaaagaatactcaaacatataactgcttcttcttgtatccttaccaataacaatctttgccttaccattctcatggttttttccataataccagcctaagaatcttcccaccttaaatgcatggtcaactgtaagagttacatttgcttctcctctgaatccgtcagttccaaaatacttacccataatctactccttaatcatcatatccgttaggattattcttctgccatctccatgaatcagcacacatagtctttaaatcacgctctgctttccagtgaagctctctctctgccttacctgcgtcacagtagcatgttgcgatatcacctggtcttcttgccttaattacatatggtatatgtattcctgtagcagcctcaaaattctttactatatcaagtactgaatatccattacctgttccaagattatatattacaattcccggattatcattgagcttttctatggccttaacatgtccaagtgcaaggtcaacaacatgaatataatctcttacacctgttccatcatgagtatcataatcattaccaaataccccaagttcctttaactttccaacagcaacctgtgttatatatggcataagattattaggaactccgttaggattctctcctattgttccgctctcatgtgctccaattgggttaaagtatcttaaaagaattacattccattccgggtcagccttctggatatctgtaagaatctcctcaagcattcccttagttttgccataaggattagtaatctcgcccttagggcattcctctgtaataggaacaaatgcaggatctccataaactgtagctgaagatgagaatataatattcttgacaccatgatttctcataacgtcaaaaagtgtaagtgaaccggatatattattcatataatactcaagtggctttgctactgactcacctacagccttaagtccagcaaaatgtataacactgtctatactttccttctcaaatatctcatttaatgctgcagcgtcattgatatctgcctcataaaatgtaacttcctttcctgtaatcttctcgactctttctaaagactttctgcttgaattaacaagattatcaacaactacaacatcataacctgcattctgaagttctactactgtgtggcttccaataaagcctgcaccgcctgtaactaatattgccattgttatctcctttatgttctatactaatatagccacaaaacttcatataacatctcgttctgtggcttattatatgtcttatgttacgatattatttgtcgcctttcatcatacgctcagttgaccatatttcaacctcgtacctgttgctcttattatatctctttctaaggttcttgagctgctttaagtactctaacgtaacctttcctgaaagctttgattcaccttcagttctctgctggaatttgtatggaatctctacaaccttgctatatgtacccattgcaagaacctcaaccataattttccatccaattggctgaaggtcagcattctcaataacttctcttctgaacataaagagtccgcttgtaggatctgatatctttctaaggcaaggcaacataacctgtcctatctttcttgctgttccagatacgaactttctgtaccagttaagtccgccatcatctccacctggaataagccggctaggtatacagaagtctgcaccactttccatagccctatacatatatttaagaacgattggtgggtgctgtaaatcagcatccatacatgccatatattcgccctttgcaagcttaaaaccatcaagaacagcagttgctaatcctgttccattctttctatgttccattctcacctgtggatattccttagcaacttccataatcacatcaggtgtattgtccttactgtcatcaacaaagacaatttcataatcaacacccttcaaagcaacatcaatctgtgctacaagatttctgatgttcttgctttcattaaatgttggtattactactgataacattatcatactctcctttaaaaagaattctctcgtcattatacatcaatatacaacaaagtaaaacatttttttatactctggtaacaaccatggttgcccgtcccttaactattattgaacgaagacctgcacttacaaagaaactgtcgcctgctttaaactccatagtcttttcataatcgtcagtttcaatagttcctgagccgttaatgaaaagtacagaaacaaaggatgcctcatcaacagtaatctttgcttcgtcattgacatcatacttatatacttcaaagtatttgcactggacaagtctttcttctgtgaaatgttcatttcttgcaataacaacctctgtcttattgtccttgatatatttatggttatcaacaacatcaagtgctttcttaacatgaagttctcttggattaccgaacttgtcccttctgtcataatcatacatacggtaggtacagttagaattctgctgtatctcacatatgaatacacctgcgcctattgcatggattgttcctgccttaaccataacaacatcgcctgctttaacctctatcttattaagtatgtctgtgattgtattattattaattctctcaagaatttcttccttagatgcgtctcttgaaagcccacagtacagatatgatcccggttcactgtccactacataccacatctcattctttccatattcattctcattctcaagagcatattcatcatcaggatgaatctgtatagaaagtgcctgctttgcatctatgaattttataaggatagggaatctgtcctgtgcctgacatttccagcctaatgcttcttttcctataatattaaggtactcattaaagagcattcctttatatcttccctcagctatacggctctgaccgtcaggatgagctgaaagttcccagctctcaccgatgacatcataatcacatttcttgccatatacatcacgaatcttggttccaccccacagattatccttaaatgcaggttcaagcttcgcaataggactcttatccagtcttacataattagcagatgcctgtgggttatccttattatatatcttaacaagatctgtatctgatatattatctccaataccaacctctattactaccacattcttgtctgtcttattagcaatcctgtgtttcgttcccactggaatgaatacactttcatatttgttataatcagcagtttcattaccaagtgtaattgtagcaataccttcaactattgaccaatgctcagttctcttttcatgccggtgaagagacattgacattcctggaaaaacagtaagctttctgactttatatccctgtgaataattaagtatctcctgtattccccattccttataagtagtcctgttataatcgaaaaatgcttcataagtatccatattatctttcataatctgcttgatattatcagcagatttctttgatgatatatatgttgcatcatctgtattaacaactacaagatctcttaaatcattggcgacaacaagtctcttcggtgcattatttataatattaacattatcgcagtcattcttgataacacattctgacttaatattgtttccaaattcagctaaatcgctggcgttgccgacatccatccactcgaaatgtgcttcaactacttttattgaatcacatttttcaaggagaagtgtttcaatacttccatgtggcatagcctgcataaccgtctctgaaaatctcacagaccttcttattgccggcacctttctcttagctgtcttacaggtagtgtacagttctgatgcaaggcgtcttgcagcattaatcatatcccctgccctgaatacaagtattccactgttccacagatacccctcaccatagtcatatccaagcagaccttctgtctcatcttcatcgaaatctattcttgcaataaacttcttaacattctctttatcccggagaatgtacccataagtggatgactgtgattctggcttaattcctaataccgcaagatatccttcttttgcatattctttagcctcaattattgaatctttataaccatcaccctcaatcaggttgtccgaattaacaaccagaactaattctgacgggttggcaaacatagtccctaacaatacagctgctcctgttcccttcggtgtaccctcgaggataactctgtacttaagactctggaacgctttcatctgtccattaacaatattcttatagctctcattggtaactattataaattcctcacagaatggcatattccttactacagtttcctgtaatatggaacggccttcttttattttcataaactgctttggaaactgccttctggataatggccataaactatcaccactacccccagctaatattacacatttcatagcaatccttccttaaaatatctgttatagataatatgtttattagttatctgctgaagtatctccacccgctggtgtattgctactgtcatctccgcctgctggcttatctccgctttcgtctccacctgatggcttatctgtgctttcatctccacctgatggcttatctgtgctttcgtctccacctgatggcttatctccgcttccgtctccacctgatgaggtattatcgctgtcgtttcttcctgctggtttattattcttatcctcggcaattgttctctcattagctgctgttgtctcttccctgctgctagtgctttctgctgctgaagttcgagatgagtgtgctgcagttgaactatccttacttgtcgcagtctccttaggtgctttggttgtatattccatcggtttccattcattgccgttattcttattattggcttttcttctgttaccaccagccattgctgctattgacactataaggataatcactacaagaattaccaccattgacgcatatacaacattacgtcttcttgctcttggtacacccggaaacactcttccaacaaatgctgtaagcttgtccataagtgaaacaccccttacagggacatcatcaaaatcattgttctcatatccattcatgtcatattcaaataacacaccttcatcagaatcctcatcgtccgattcatcattttctatcccttcgtctgattcattatcaggtaaatctgcattttcaggctcataagcctcgtactcgtcggcagcttctgtttccgctgctttctgctctgcaccatatatcttaatatcagaatcatctgtctctttttcatcaaacgaagcataatctgacatattctctacaactgatgatataccgagtatattatccttcatcattgcaataagcttaagaataaattcactgtctatatcgagcaaagtttctatctcgtcaactgaatgcatctcatatccgtaaagttccatcataatagtctggactcttgataatgacttaatattatcaggtgcattgtcatacgccttaaaatctttaaatattctggaattatcttttattatgtcaaataattccttatcttccttaattctgccatactcatactcgtaatcatcatctatcttaatagtagaattatctataagattaaacataaacactgaaactcttgttgcaatctgacgcataatattcttattaacatcaatactatcaagattagtacatatatcaataatcgctcttggagaaagtttcttgtaatcctctccaaaaaccggatatataagacagtttacatctttctgtatctccttgcataagacctctttatcagtctttccagtccttacatcattaatcagttccttcatctgttcttgattcttactcatattttatctcctcgtgaatatacattccgattgattataccactctgttaaagaaatgtcacgatttttcagttgttttatatagtcacatcatttaatgcttccatgcactcatgtcaacattacctgatataccattcacacgtgctttctcagtaaactgccacattgtaaatggtcctgtatatgtacatttgctgttatactgtgcaagccatacactacaacctacattccctgcatatatacggttattcatccagtccttgttagcatacagtattgctgaataaccgcaacttcttactgtctgtgcaaatgcatttataacggctgttctttgtgatgatgatatcttatctcctcgtccgcttccattacctgcactctcaacatcaattgccaaaggaagtgaaatattatattcactgcaggctgatacaataaagcttgcttcttcaaccgcttcggtagtatccactgcctgggttacaatataagctccaactttaattcctgccgctgttgcctggctcatattgctatgaaatcttttatcaagtacaagtcttgccgtttcatatcctctatatccaactcttatcatagcataattaataccagaagcttttacactgttccagtcaatatctccattataagtagaaacatcaataacaagcgatgacccctgtgaaccgtcagcattgaaataatattgcactccatctatattcttccagcctgttacagcgttggaattttcaaaataataattttttccttttatattctgccatccatcagcatatatatattcaatctgtgcctcaacctccataactatatacgaaactgtttttatttcagttgaagtttctgtctcagattttgaactttcttctatattagagacgctttctttttgtgaattatcaggtgcctttgcagaagtactttcttcctgctttgtagaagtttctgtattgtcatcttttataaggaatttggttacaacattttcagagccacctgtaacacttacagttccagtttcatatacatatcctgtatattgcttctgtgttccgttttcttcaacaagaatactgcccttgctgcatttatcaagctgggatgccgtgaaatcctgtatttttctgccttttaagctgtatataacatctgttcctgacttctttactgatgaaacacttacacttcctgaaactgcattatcaacatataacaccggctttataacttcaccagctgttgcattatttctgtttttcaaaggatcttccttctgagtcacagcactgtcagtaacaaccttttccataatatcatcaatcacttcaaatgtttcttctgtagattcctcttcttccggctcagtactttcaggctgtgtatgagtctgcatttcagtctgggtctctgctgcttctacaatcgccggctgatgtttagatgctttatttacgcttataccgactacaatccctgttatcactcctgctataataactgctgcagatactgatgtcacaacaatatgactcttaaccttgaagaaatcgataaccttttccctgaaatttctctgcagttcctcaacatcaagaatctcatactgcggttcttctggcaagtccttcttctcacagtcttctgtctctgtagatgcttcgtcattctccacattttcttctgtttttatgtcttctacttctttatctgaatcacacatatctgcttcctgttattcctctgcacctctgacaatagctgctttcttaataacttctccttctcctggcacattaaaagcatactctgctacataggtgtacttatcaaagtcgtacttttcttctattgcctgctgctctgtcagtacatcttcttcctctgtttctatattaaccttctttattacaactccggttaattcagcttcctgtccaagattattcttacaactgactcctgtcctgaaattataatcctttgacatagtgttattctttacaacaatatcatttcctgtaaattcctctgttataacctcaatctcaagctttgctgtgttctttatccagccagacttagggtctttaaaacggtactctactgtgtatttcccggccgttgatattgcttcctcctcgctgtattcattgcctgattcatcatatattgaatactcgatatccatatcatatccgatagtattaattcccttaactccgtcaagcagattaagttcctctgtcagtcttccgattccatcgccgtatgtgcgcttaatctccttgttagtaaccgtaagcacagcgtccttagtatcaacatggtagttagcatagccgaaaaatgctatatctacatctacctgtccactgataccatcaacataacatcttgaactatactgccacatatcataatgatatctgaaatttggaagatcatctccataagtccatcttactgaatcataataaaacttaccaaaatatgccgccatccaaactttatacttacttgcaatcttttccccatcaaaattgttataccatctgtttctgttagaataaaccataggctgatatccatagctggatataacattacaaaacgtctcacaggcttctgttactgaatcataatcaccatccagttcccagtcaaatgcaaccggatatgttatctggtaatcccttataagacttatacagtaacttgcttcatcgtatgcttctcttgcattagaagcacctgaatagaaatacacacctacctgtataccgttagcaagtgctccttgtatattctgctgaaatttcctgtcttcatataaaccatcatctccgccaccgcattttatcattgcaaatgtgatgccatcagcagcaactgctgaccagtctatatctccctgccatcttgaaacatctacaccatatgtcaactggctgatttcatatacatcattcgagcttggctgatctggttcaggctcctcaacctcagtctcctctcttgatggttctgacgaattatcttctactatctcaaggtcctcaacatctttaaccggaatcggtgcactgctgttctctgctgccttatcaattatctcatataattctttactgcttgtattctcatctgcaacagcctctttaacaagttctgctatctcttcctgtgttgcagtctctatctctgtctctgattctgtttgtgtttcggtaagaatctcactcagcttatcaagattactgtctgtctcagtctctacttctgtctcctgtgcctgtacctgcattttgctgctatgatgatgaacatactctactgttgttacagttgctgcacttcctgcaaccacgactgagcctgcaataatacatgcctttgcatgtgccacaaatacagacttacatattcctgataattttcctgctatggtatttaataattctttcatcctacatgcatctcctgattagtcataataatgtttgaagtaaactctcccgaatattgcccatgtatcgcagaatgcctgccatatatccttcatccctatacgctttacaccggaatccctgacatatacaacctccacaggcatctgtgctatcgaaaaaccccttctgtgaatcgccactaagagttctatatcataagcaaaccctgatgttcttataagatgtgcaaccggtttgattgcctcaaccctgaataccttaagcccggtctgcgtatccttaacattaagatggaacaagactagaagcattatataatagcccatgcttatcactttcctcttaaacggataatcaagccttgaatccttaaggaacttacagcctataacaacatctttattatcatcaagcattttcttaagataaccttctaactgtgatggattaagttcaaggtctgcatcaacaaatgcgacatactttccttcaacctgcgacactccggcaattattgcattacccttgcctctgtttttttcagaacttaccatacgcacacggctatcctgcttgatagctctttctatctcagctttggtattatccttactgccatcattaaccgcaataatctccaattcaggaacaaacttttcaacaattctcaatgtttccatgatactgtgatatataagtttttcctcattgtaagccggcataacaatagacagcataccatttagatttaacatttatactctccctctgatgtttacacaccttttaatattacaatgctatgccatgtttttcaagtatagacaggaaattaatgcagataatatcttatataaaaactatcttatatattataatgaggtgaatttatgaataactcagaaaatcttccaacagacaacaacaataaatctatcgtaaaagggaaaaccatgtataattgggaaactcacgataatcaggacaaagtgattgtcgacagcattaatgcaatcgaaagaagacgtgagcatatgactgacgaacagttaagaaaagcctacacagaattacagacaggacttggtcctgatatatatagtcagttatgtgaccgcaaggcaagtgacaattttcaggggtgactttattatgagtcaccccaccacctgcaattatatattatttgcggcacagtcaagtgctgctgccacaacagcatccatgtcataatatttgtactcaccaagacgtccgccgaatataacttttctttcagcgtcagcaagctccttatactgtgcatataaagcgccgttcttctcatcatttacaggataatatggctcatcacccggcttccactcagagctgtattcacggctgataacagtcttaggaaggtcgtcgccattctcatccttaccgaactcaaaccatttgtgttcaataattcttgtccatggagtttcggcatcagtataattaactgctgcattaccctgaaaattaggagtatccaaagtctctgtttcaaaccttactgaacgatattcaagattaccaagcttataatcaaagtatgcgtctatcgcacctgtatatacaaccttttcagcctgactgtctaattcttccttagcatcagcagatgcaagataatcaacaccaagtcttacctcaatgcttccggaaagctcgctgtcatcaagcatattggcaaccatcttagtatatccaccctcaggaattccctgataaagtgcgttaaaataattattatcaaatgtaagtcttacaggaagtctcttgataatgaatgatggaagctcattgcatggtctgccccactgcttctgtgtatatcccttaataagcttctcatatatatcggttccgacaagacttatagcctgctcctcaaggttcttaggctctgtgattcctgcttcctttctctgctgctcgattctttctgcagcctcctgtggtgtcacaacgccccacatcttattgaaggtatacatattaaatggcagtgaatacaactcgcctttataattagcaacaggtgaattagtgaatctgttgaatgtagtaaactgtgaaagatactcccacaccctcttattattggtatgaaaaatgtgcgcaccatatacatgcacattaataccttccatcttctctgtatacacattaccggcaatattatttctcttatctattacgagaacgctctttcctgctctggcagcctcgtgtgcaaacactgagccaaaaagtcctgctccaactattaaataatcatacataatcctgttccttttctatcttaaataatgggatgatgccgacgcaccaccccattaattatacttattatatcacattaattcaacataagaagtaattaataataatcaatatcagatatataatcttctgtccttgtataaccatctaactgtataatagcatctgtcaggacagtttcaccattgtcaggattatatttttcataattcaatacaatacaaggattatctgcatttatatttttattaaaattcttcttgtcaagggactctataagtccatttaatactttttgtgctctttcttcatcttttcttacatatgaatccagattaatatatgttctggtatcattatatacaagaactgctgaaagagtttcatatccactagtatatttatcccatgttctggaactgtcatttaaatactgctttaaaatatcgctcattgtcccaagctctttttcattattcctaatggcatattcattccgtataccaatatacttattataagattgtggcatattcttactgattggaagaaccatatcataagtaacgccttttttcgaaaaccgtactgacatcaagaaagtatcagcatctgaagtaactatctgataccatttctcaaaaccaatctgtttaatttcacttttaattgtttcatatatatccttacagtcagaatcctccatattacctgttatataattaacagaaatcttgtcactatccggaagttccatataagccttaacaaaattctcatccttctttaacagacttgcaagtttattggcatcactgtctgtaagctgaatccttctgtaatgtgtaacaccgttctgtctgaaaccaaccttataattagtcactgaacctctgccgttataaatataattatgaacaccatttgatatacatttatctttatatgccccaaatttctccgatacatatttgagaatctcttcatctgtaaactgaaccttcgatgatatagaactgaaatatccgttatctgaagcatagtacatatccattgactgaattgatacatatgcaagttttgaagcatccggttcgtacgatgcctcatatttgccaaatgaattagctcctgttccaattaccactgcaagaacatatccaagaagaattgatggcatacactgctttataacattcatcttcttacttactatacattcataaacaaacacaaccaatgcacttacaataaacagcacaacaactgctattgtctcatcattgtctatacttgtatatgctatcattacacctataaacgcaattgaaaagccgataagtgttctgataatcattggcagaacctttccattagctgcttttcctgctgtctcactttttctctttacaaagagaagtgcgccaagcgctatatatataagtgcaagcacgagtgtatataagttacttgtaaggctgagaaccatatctgctattcctgatggaccattgtatatatcaaatacagaaaatacccagccaacaatcatattgttggaagaatcaagtaaccccacaccactgttacttatcatgtaagtttctccatgaaacacagtcagttctgtaaccattaacataataaatctcggaagaaacattataagtcctgtaacacatatattgcttaatatgtttcctgtaatggatattgatacatttataattgccatgcataaaaggctgcatataaatatcgaaagatacatccggaacattgttgcataatccacattaaaatactgcctgttagccattaataaaactgcctgtgatacatatgacacaacaagtattccggcaatccatgtaagtattgctgccgtcttgctaagatatatgcacaatcttgtatatggaattgaatgataaaaatcactgccgcttctcttattaagaaaactccatactatcaatgatataacaggtacaacaattatgaatactaataccagaaaataattccccgaaattccatctacattattaacctgtttatattctttaatatagcttaatgatgaaataatcggtacaactgatataagtgtaattaccgccatcattataaagcctgcaagccttgtctgcttcaatgtctgtaaaaacatatgaaagctgaatactttcttattattcatgcgtcttatcccccttcacatcaaatgtataaccgagtgcttccatctcataagtaaatacctcttcaagtgtaagcgggaggacatcaaatactaccggattcatggcatttataatgtcaatggtctgttccctgtcaccacttactatcatgttggcaactgaaccctcctgacggtatctagtaatcctaatgccctcaaacttactctcatcaaaatcatccttaaaagcaacctgtaccttgaactgactcgtctttagttcaaatacatcgctgtcaagcaccagcccgcctttgtgaagaagtgacaaatgatcacataagtcttctaactctcttaatgaatgtgatgtaactataacagtagcgttattatctgcaacatcaccacatattaacttcttgacaagattacgcataacaggatcaagtccgtcaaatgtttcatcaaagaacatatacttggctctggttgaaagcgcaagtattatagctgcctgtctcttcattccttttgaaaagtttgatatactcttagatggatcaagtccaaatgtttttgtaagttctgcgaatctgtccatatcaaaattatcatatattgaactatagaacttagccatgctcttcatgttcgcgcctgcaagaaagaataattcatctgcaacgaacaccagcttattcttcatgtatgtattctcatacacattaattccatcgattattgcttctcccttatctgccttatatatccctgacaggactcttagcagcgtagactttcctgcaccgttagaaccaaccataccatatatacagccctccgctatattacaggtaacattgtcaagtgctgtaaagtcatcaaatgatttagtaacaccttttacctctatcatattctcttataaacctcctcaatcatatctgttatctcactcttactcacccctgcgtatgcaagctttcttacaatctccttaagatctgaaagcttttccttagactgattcccgacaatctttaacgcttctgccgatataaaagagccctttcccggtacgctcaccagaattcctcttctgtccagctccatgtatgctttctggattgtattcggattagtagacagctccatcgacaaagaccgtaccgatggcatcttatcgccttccttcataatccctttaagcacctggtcttccacctgcttaatgagctgttcatagactggcactcgcgacatgacatctatagtgaacatgttccattcctttctgtgttttatttaaactggttacaagcttgcgtaataactgtactatattgattagtacagttacagcatactattatatttagttattgtcaactgttatttttaaggttttgcaaatataccaagcgcaggcgcaccatacgagcatgaaacaaatgctgctgccatcataaaatcaacaattgccataatccatgttccaagtacaaagctctcatgcccggcacgtcttaacacatgatactccacagcgaaaccaattagcactgccacaaaaaatgttgcaatatcaatccacatttttgaaaatccaagaactcccatatatgtgtagtacagaaacggaattgcccatgttgccacatttgcccccagaagaattgcgaaggcactcgcttcgtatctgtcctttaatgcataccatgtatatattccatacagattcatcggcagaaacgccagcttcatatgttcccatgttgattcattagttggaaaaaacagcccgacaaatgtattccttcctgtccagtcatacacaaaatgaaataaggaccctgacacccatactgccagaatccctattattatggttatattaagttttttgattgtcttgttcacaatgcacacctccattattgttgaataatagaagtatatgcttccatctgttgtactattccacttcaacagtcatagttacatcagacacttctatgtatgttcttccatcacttacattaatctctgttccatctgcatatgtatacactgtcttggaataacggtctgacttactccactggattggaacagcataaccgttagttatgtaataaccttcccccctgccgactgtatgaagattccagcagtaattatcatccatcatgctgtgtgtaatcttctgcacgataatattcttagtattaaactgttcacctgtttcgtggtcaagacttggctcgccactcgcaaaccttaaataattacctgacgcagcatcatatgtaaatgttgtgtactgataactgctgtaaggcacatacacagatgatgcactgactgaatcttctctttttgaaaggtcaacatctgatacatcataattaagcagtactgtgtccgatgcattctcagcctcagcattgaaacctttttcctgtactgcactctttaacctgtaaagcgatgtatatgctgtatgctctgttgcaagcccttccggattacgtctccaataatatgcactgttatagaagccgttaatccagttaataccagtctttgcctcatcactctcagcgtaagtgcttccgccaaaatgtacaaatatcgcatctgactcaaaacagaaatccaggaaattatgtctcgcacttcttattgttccaataaccgtatctgtctggcttacattgcctgaacctacaatctcctgtggtgcttcatctgtaacatctgaatcctctaccttgaacaaggcaagtagtctgcaggtatagctttctgttggaagctcatacacaatatacgccttattaagtccggtctgcacctgtacagctaccggtgtattgttaacagatactgcaaatggtcttgtcttcgaattaacgtcaattatgtcgatcgtattatctacatacacagttggttcttctgtctgtgaagaagactctatcggattaacattctgtgataaagcctcgcccgtaggattacctcctcttattctgcgtatcataacaacacacatgacagccgccacaactgctgctgcactaagaacagaaattataataatacgttttctattattaatcattgattgtcccccatcataataatcttccttaattgtacgacttgtacttctatatagcaagaaaaaagagccatacataaccatagttatgtacagctctttattaatatgccggcaacgggaatcgaacccgtatgggagtataagtcccgcaggattttaagtcctgtgcgtctgccagttccgccacaccggcgtaaagtgcctgcatagcaggcgtattattaatacatatgacttcctctggcgcagcctaagtgtcccaaatgcaataacagatatgtagtacatcacgactctttactacctgcagattcaacatatgcagtgaatgaagtttagcacattgttatgtttatagcaagcatattttgtcagtttcactattttgtcacataattttcataaactgcctgctctaactgtgcataagtaccataaaaagcggtacttttgtcacatttgtcaagaagaactgatgccagtatatctgaatatctgtcggcaagttctccaagcatatgaccttcttcatcaaagaagtcatcatctgttcttggaagtgtatccattgttaacagattgaaatcataatattcaacaccatattcttcacaaagcctcgtaaaatatgctcctgcctgttccgaataaccgttaactgatgttgtcggcgtaataggtgatgtaacgcataccagttcaatattattcttcttacaatattgaacagtcttttcaaatgaatccagaaccttatcactgattccactctcatcccatgcaacaatatcagatggcacgaggctgtccatcttcatatctctatagaaaaatcctttggcagcataaggtcctccggcatcatgtatctcaactgcatccatactgtagttgcggtatgccgcactgctcttaaccttaagattattcataatagcagacggtgatatctcataagcccatctctttgaatatacagtacgaaaatcctttgtgagcagattatcagctatatacttaagctttacattactgaaaggaagccatgtatatatgaaacagtcttcaaactccctctctgcataattgcaccagtactgataatcaaggtcatatataactctttttacattattatgccggtcactctccattaaaagataatatgaatctgttaccgtctcgcctggtattgcaagattaaatgcattgtcagatgccccggcttcatcgagctttactggatttatagcagatcttgcatgtgaagctccaattattatattgtcatatccttcatcagtatctgcattgtcggcctcatgtataatgtatcttatatagcctgatggcatcatcgcataatccatacatttgacaagtccggccactatggcaataaacaccacagccctgacatattttaatattttattactcattgcccctcgctttaattgcctctatgtactcatcataactgctgtaaaaatattctgaacaatcattctttttaagtatctctgtgagtacctctgagaactgctcagcaagcgctccgttcatatgaccttcccagtcagagaaatcatcatcacttacattaagaatctcattcttaataagattgccatctatataccttacattattctcatcacatatctgcttaaaatatgtattagcctcattggcagcacccgaaacaaccgacgatggtggaattggtgtagtaacacatataagctcaattccattgtccttacaatacttaactatcttctggaaatatttctgcaccttaggattaagatcatcatatgtccatggtgatggattaagctttcccttcttatcagttaccttggttcgatagaaaaatcccaatccctgatatggtccttctgtttcgattccggcaacaccctcaatctggaaattcttatattcatcagtcttctttatagccatatatttcttagccgttttccaattcctggcaaatgcatatcttctgaaatatattgtcctgaagtctttatccataagctggcttactatatactccattttaagacttgtaaacggaagctgtccatatacaagaagatctccaaaatccgaatcacgtttcagattcttattccagtactgataatcaagttcaagaattatcttctttacgtcattattattgcacgcttctctgatcatataataattatcaataaccgtggcgccctgaatacacatattaattggattaactgcatattccatttccagaaaataatgcgggtcaattgaagcccttccatgtgaagctcccactacaatacaatcataatcagagccatcatctggattgtcaaccgtatggattatatatcttgcataccccggctgaaccattacataattaactgcttcaacaagtatagttataaccgcaaagaatactatcaccctcacatattttaatatctctttaaatgctttcttcttcatggtatcctgcacctctgattagaactgggcgtacataaatccacccgatgtattagaaatatagccaagcattgcaaccgacataacaagagctatgtatacagcccatctgataatcagaggctttctgtcaagagcttccctgattacaatgcctttctctttaagtatgcttataataagccatactaagcaacctgcaagcaatattattaaatccagctggcttccagacatttttacaacggcgtccatgctgaatgatgcatgtttaaatgtatttcccataagtctgaatgcatctgtaagagtagctgcattatcaaaataccagcttatattaacaagtataaatgttcttattatctgccatcctctgtaccagcgtgcattcttattaatatgagttattttaaacattttttcataaacaggtgccataatactgctaaagctcatgattataccattgtacataccatatacgatatacttccatgctgctccatgccatacacctactataaagaatatgagtaaatctgccagacatataggcaatgccttcgccatatatttaccaaatcttgttttgctgtgtttcttaaagaacttacccagcttattcatggctttacttaagctgaatggatagaacacataatccttcatccatgtaccaagtgttatgtgccatctgcgccagaactctccaatagaatgagagaagaatggctgcctgaaattatcatccagatggattccaaacatctcggaagcacccataaccatatctattccaccggcaaaatctccgtatagctgtgcacaatacgcaagaacacctattattacatatattccatgatactgaccgggattattaaacaccagatcagacacgactcctgcacggtcagctataataaactttttgaaaagtccccaggccatccgctgcaatccatgctggataactgcaagatcatacttatgctctgccaaaaactgtggtgcaagcctgtcgtatcttccgataggtccctgggttatctgcggaaaatacgaaacaaacaaggcgtatttaaaaatgttattacatgcctttactttacctctgtacacatcaataacatatgatattgactgaaatgaatagaaggatattccaagtggcagaagcagtgtaaatgttgatatcctgccattgccaccaaaagccttaattacgccattgacgttctcaatcgcaaaattatggtacttaacaactgcaagcacaccaaataccagaagaagagcaagtactacaactcttttcttatatatctttgccttttcttttaaagcctttttatcttctcttgccagcccatctgctttaaggctcttgtcaagattatcctctgttctctctaaaaggattcctgatgtgaaagtaacgattgttgtaagtaatatgaacacaacagtcttatatcccgaacataaatagtaggcatagcttaatatcaaaagccatgcccactgtgccttcttaggtataagataatatacaattactcccactaataaaaataccagaaatccggtagaaactagtgacatattattttaccccgctttccggattaatcctgcagacgctgaatcatctcccacatagcttctgctgaattaaagttctcaggtactatatcaactggtgtgatatcaatgtcaaatgcatcgtttaactcaccaacaagtgatacaatatcaaatgagctgaatataccatcatcgataagagtatcacaaatttcataatccacatcactgttaatttcattcaaaatgtctaataactgatccataataaacctcgcaaaaaaattattaatcacacatctgtgaacagaaaacattctatcttctcattcacatatagtcaatcatattttgtaacaaaattgtaaaattattgtgtactaacactgtttattaaaaaagtgtccactggatttctaataatcctgtagccattcttctttgaatacatcacaattgctggcatgcgacggctcagaaacagatatattccctccgtaaccgaataagctccaatattataaaatgctaacatatcgccaatcttagcatcctttaattcaagattcttaacaattacatcgccaactgtacataatgaaccgcatatattatatggctgtactccctgtgaatacacttcgacctcatgatctgcaccatcagcaaacccttctgtgtactccattggaatgaattcacatcttggtttcttcatagccatagcctgtccataataattaatatgattaattccgctgtcaataattgcatatcttgttgtgtcattcatcttcatatcagcaattctgcttataagaactccacaggtagctgcaatatatcgccccatctcaagagtaacattgaatttttcggacatttctttaatcatgcctgcaaattcttctaactcatcaaagttagtattcatggcatcacatttgtctgtaacgaagtaatcaactgacagaccaggaccatattcaatctcattaagcttaacgccatgctctgcctcacatgtatgtgctattgcctgtaaccatacaacttcagattctatctggcttaatttcttcttctgggttcctgaatagcactggattccctcaataataattcccttaagttcatcctttctgtcagcaatctcatatacctgacgctcattaatgccgaactggttgccacttgtaactcttataagcaccttaactttaatgccacactcaactgcacatgaattgataagttcaagctggttaagcgattccacagtgtagattccaacagcacctgtcttcattgtgtagaggatatctttcttttccttattaacacccgaaagaacaatcttagacctgtctataccttctttttcacatattgcaaattcacccggagaacatacctcgaatttatcaagcttcttatccagcgtaccaataagaaaaggattcgccttcattgcataacatactgtaactccacggccaagaatttcctgcatcttatcgattctttcacataatacatctgtatcaaagatatatgacggtgtaccacattttatggcaatctcttttaattccttaactcctatcatcctatgcctcctgttctttatatatcttcataagttcttttctgtcaatcttaccattcttagtaagcggcatcgaatcaactttaataagcacgtttggaatcatccactgaggcactttatctttaagagcatgtgttacgccctttctatcaagctcacttgtactttccgtctcaaagaacccaagaatcttgttctcatcagtatcaaatatacagcagcttctaagcagtccctctataccattcatgtatgtttcaatttcgcccagctcaattctgtgtcccatatgcttaatctggaagtcctttcttgatgagaagaaaagttcaccgtcttcactatagtaaccaagatcacctgtgcgatatatagtttccagatatctgtcattaagaggattctgtacaaatgctgctgctgtcttttcaggattacgcagatacccaagcgttactgctgttccggatacacatatttcccctaattcgcctggtctttctgcatcaacaagcttatcctcgtcatctaacagaaatactctttcgttggcaaacggcttacccataggaagtttctcgtcaaggccaaactctctgtcaataatgtaatatgtacaattacatgttatctctgttggtccatagaggttaacaaacattgcatcctgatactgtgctctccatgcgttaagatgctttataggcataacctctccactgaacataatcttattaagtgaagatggtctcttatactcgaatccattaagagttgtaacaatacataacgctgatacagcccatataatagttgtaacctttctgtcatcaaggaaatcaagaagctttgttggaaacgagaagcacatcttaggaataagctgtagggttgctcctgtctttaaacttgaatatatatccttaactgatacatcaaagtcaaaaggtgcctgattacctataacatcctcattagtaattccaaatgtttccgtaaaacagtcaataaaatctattgttgaacggtggttaactataactcctttaggtacacctgttgaacctgatgtaaatattgaatacagaggatctatatcaagtgcctgttctcttatctttcccagtctttcctgagcctctgaatccaacacctgtccatcatattcttcaagtaattcatcaagattaataatctcaccctgaaatcctagtttttctgctttcctggcagacttattatctacaaccagaacatctgcctgaatcgtatctaatataagattaattctctccactgggtgagttgtatcaagcatgcagtaatacccgcctgcatacacaattcccataaataaagataatgtattacatgtcttatccatatacacaggaactccctgtgttggcttaatcttaagtgagagacagcttcctatgaactttgcctgattcataagctgtgtgtatgtaagttcattattcatgtccgcacacgctgtcttttccccatacattctctgtgagttttcaagaaactctaatacattcttttccattaccttctccttttacttcttactcttatcttttctgaatacaagcagcttgcttataacataattaagtataattacaactacctgcgcaataaactttattaacatactgttgaaatgcagcattgtaatgaatacaagaagaattatctcctcaattacaagagttaatactcttccacctgcaaatgaaactaactgtttcataaattcttccacagtcttagttggtgctgcaaacacccatatcctgttagtaaagaatgcaaaaagtactgcaagtacccatgatataacatttgcaataagctcattaattccaagtgcaacattaaagaatgcatatgaacctatactcaccactgttgtaagtactccaaagaaaagatacaaaagtacttccttatacttcttatacaatggttcaaacaccctcagacccggcagatgcataatcttatcaaatatatccggcttagtttcctgcatattattatctgtattgttactcataattacctcactgtttttattgatataacgccatattattttatacttttatcaataacaaatcaagaaaaagacgccgtataaaaacggcgtcctgaaaattcatttattattttgattcgttaataacgatatcatctgtctcaacttccttgtttctgttttcatcaatgccaagcttgttattaagctttttctttgcctttcttaaataaataccaagaaatgcaccaacagcaattatcactccggcaatagcctgaatggcataagtcataacagatgggtcaatgtaacctgctacatttaaatttaataatgtcaacatactttttatctccgttttaattaaattccttttttaatgcttcaagcatcttgttgttatctgcatcatttctgattgcaattcttatatactgttttccatcatgtacttttgatgtaagatcctttataagcagataatgattcttaaacagttttatcataagttcttttgccgtcattccattagttatctcaatcataaaataattagcctgtgatgggataactcttataccagatatctgctccagttcattatagaacctttttctttctacgcggaatttgtccattgcagccgcataatctttcttatacttttctgcaatctgaagataatactcaccaaatgaattaatattccatattgcaacatcttttttcattgctgcaatcgtttctgtatctgaagaaacaaggattccaagcctcagccccggtacaccgtatgatttagatatacttttcataacatataatctgctatatgtttcgataaatttctgttctataagagaattatccggttcatctgagaaatcagcaaacgactcatcaaccaccagctttattccctgactgtctgtccattttattaaccttataatctcttcctttttcaggtaattaccagatggattatcaggattaataataataatattatctactttgttgcatgtatagaactctatcagttcttcagctgaatatgtataattatcatttgacggtgtaaataccacttcgtcttcaacagcatatctgttaggatattcttcaaatgtaggtctgataacgcctgtctttccagaaaaactctccataagtgacttaataagttctgctgctccattcccaactattatgttgtctttgtggacaccaaaattcttagctgcaagtaaagaattaactcccatacctgaaggatattctgtcaaaagtgtatcaaagcttgcacgcagttcatccttaagctttttaggcggataataaggattaacaagataacagaaatccaacaatcccggatatctccagaatcctccatatcttttatgcataaggttaattcttgtctcatcatctggagcaaaaagtgttgttgctatatcaagatcctgttcatcatctatttcataccatttctgacctgataatctcatacctttaattccaggtgtatccagcattgttataactctaagaacctgttcataatattcattttctcccaacgcactacaatatgcctcaaggaaaggaacatatatatcctgtgaaaaatgtttgctgaatttgtagatatttacagttttatagtattcctctttttccttaaaatcaaagctctttcctggaacaaatgcaacaatattatcatattcgtcaagctttacacatgtaccatccatccagctctcatatttatctaccatggcaagtgtatctctcggatcttttacaagttcatcaattgcagaatcatcaataattacatctgattcaaaaagcagagtatcttcttccataagataattctttgccagtgcaagtgaataaatattgtttgtcttatcatataccgcattgtcaacatatgaaattggtgtcttaattcccaatgtcgctatataatcaatcagcttctgtccttcatagcccacaacaatcactattcttgagagatgttgtttctcaagctgatgcaaaagcctgtctataagcgatactccattaacctttaccatacatttggtattattctgggtaagttcctttaaacgctttcccattcctgctgctaaaataattgcctgcataatcccctcctataatctgacgttactcttgttccttatgtcttttaattgctttttgaatttcctgaataatatatttagctccaaccgaagcactactgccaagattatacacatattctttaacaaatcggtctatgctgtccttatatgtatcagaagctgccagcatctttgctgctgtatcagctgtcttatcaatttcatcaagcttaagtacacgcccgatttcatatctcatccatatattaagtggctcaattccaatctttttgtattcaggattcattatcttcattggtgtatcaatgaaaagaaccggtttacatgtagtataagcatattcatatgctatacctgaccagtctgtaatcataagatctgcctcaaaaacagtactgtttgatgaaaaatcagtctgaatctctatatctgtatcattcttatatctttctttaagtccttccatcttctcaggcatatgtcttacatgctgtgggtgtggtcgaactgtaatcttataaccatgtcccttaagattatcaagtatgtcctcaagacagctgtctacaatattatctttctgccatgatggagcaataagtattgacttaatatcattttccttctttggcatctttgcataatcctcacgcatctcatcaagcagtgaatatccccactcaacaagctccttcttaggaagattatacacttcttcagttttttctatttcttctttctgaatctttcctgtacataatacagagtcataatgatccatcgaaccggttcgcattgtcatattaaggctgtccatgccatgaggaacataaacataattaatatcttttctgatataacttctcttaatgtgataattctcaatatcaggcatagtcataacaacaacatctgcatccatcttcatcataagtgttataagtttcttttcccctatataataaggtttaatcttactttctttttctgcaattctgaatatctgatcatctggatcacttgttacataatgaattgtaatattcgtattattaagtatgtattcaattatccctttaaaatacttatagaagcctgagccctctgaatagaatacaagatgtttattaacaacagagaaaaactttttataatcggccttttctctcttaatatcttctttgtttcttttaccctttttcgtaccaagggcttcaatctctgcaagttctttctttgtttcctcaagagcctcataatcaacgtaattcttaggattaatagcccagttaagaagatataactgaagaattgcaaatatattgcttgcagtccagtaaagagctactcctgcatatacaaaacatcctaaatataacgacaaacctactgaaaatatcatcataccatacttattaagcttactctgttctgcctgtaatacattacttgcattctgtgcaacacataaaagccatgctgagacacctgctataattggtgttattattgataatccccactgttttgtagtaatccatgtaaggtcatagccacagaacttcatgttcgcaacaccttcattaattccgtctttgataactgcaacaactccaagcagaagtattatctgtataataagaggtataagtgatgccagtggattatatttttcttttttataaagcttagactgttcctctgctatctcatccttatccccataatgcttaataagaatcctgttaatatcaggctgcatcttaaccattttaattgaattcttctgtacccagattgatacaggtaagagaacaatcttacttatcagagtgaataatataattgccaatccataatcatgcagtaatttgtaacaaaaattcattacataacctaaggctgtcgataatatttccataaataactcctcttttgaagattttattgattgtgtcagagtcatccaatataataattaatcatatcacttattatcaattattgaaaggtgtttttacataatacagtgtccttttaatattatttatttatttcaaaaggtattcagcatatttaactgccatgtctcgccagttttccaatgcctctcccatatctgcaccacatgattccctgtacatagcccatacaaaccagtagtacgcaataatagcaacatatgccatataatgaaatcttgttgtctcattataatcttcctgaaggtattcctttatgaattcctcagccttatcaaaatcatacatggcatcaaccacataatatccaacatcaattcccgggtcagaatatccagaatactcccagtctataagtattacacttccatccggtcttatcatccagttcggcttatatgtatcgccatgacagaaacattttttaactccatctccaagagtcatcttatacaactgtcctatgctgttcttaagaccttcatactgaacaaagcacacgggatctttcttctcaagaagcttctccatatcaagtgcatcttcccatggcttcattccataatcagccgttatatctgccttatgcagctttcttaaaactgccaatatcttctttgaatcctcaaaagaattataatcaggttctctgaattccggaatgaataccgatatcttccagccctcattaacatctgcatatatgtatgtaggatctacaccagcttctttagctttaataagtgattttttttcatttcttctattgattatgctttctgttccatcacccggatgtctatatatataatcgactccatcaatcttgaatataaatgatgtgttggtcattccttcacttacatttctgaaatcaactatatcttcctcatcacatctgaatacaagcttaatatttcttattatctcactatgtgtatgtccaagatactgtgaatcaaactttctaagttcatcaaaataatcaaattcaaatatattacctggaagatactctttaaagaaaatatcaggcaaatcattaagtttatcttttacaagtatttcccaatagcagttattatatataccagattcccggacagcctcaacctgattaataaatgcttctgagaattcttttctccagaatgaatgtcccataagaacatagccatcaatcttattatccctggcaattcttgttatctttccaaatccgtcagctcttgcatatacttcatctgttgtttcctttccataataacctgaataaaatgtatgatattcaaactgattaaacggattctctatataataactgtcacttacacatatataagtattcttaagttcttttcttgcaagataaagactttcaatattattctttatattaaatgaatcattaataataaactttacaccatacttgtcttcaagatagtaaaacatctccttcttataaccaagcacaactgtaatattcttaataccagcatcctgaagctgctttatctgtctctcaataagacgttcacccttaacttcaaaaagacctttgggctgttcaagtgataaaggaataaaacgtgtagatgcacctgctgcaagaataactgcattattaaccctgtatggctcaagtgcctctaatccagtctttgtaatactgccagactctttttcaatataccctgtttttacaagtttattataaatatctgtgtcattaagagcttttgtctcctcaacatcataagtgcagcccgctcttccaatgcttccattatacaaactgttcaatacataaaactcttcttttctcattatacatatctccttatgccatgtttcctgagaacattcctcgaatcactgctttaattacattttctctgcatgattcatacttctttcccgaaagtataagcccctctaccttaatgttctttatgtccttcttctcaactgaatacaaatcatctgaaagaaccaccatatcagcaatctttcctgcctcaagacttcctctttctttctcgtcaaatgttacataatatccattatatgtacacatccttagtgcttcctgaaccgatactgcctgagactgattcatattattaacagctttgtcaatccatacaataggatccggtgatgtacatggagcatcagaaccgcacgaaacaactattgcgttctcattaaatgttctaagtggattaagcctttctgttctttctttacccataatactttcaagatactcatcaggttcctgtttccagttaatgaaagcactctgtacaggcatctgtatattataatccctgcatatcttaattccctcttcagttggaagacagtcatgtataattccatgtctgtggtcttttcttggataatcgtcaagtgccgccttaagtgccctgcatgcctggtcaaatgctttatccccaatcgcatgcatctctatctgcagtccggctctgttagccttcttgcagaaatcaataaccttttcatcatcataataaagtactccgtcaccgcctaatgaatcaatatatggttcattcattgctgcatcgtgtgaaccgaaacatccgtcaagtgcacattcaaagcatccgcctattcttggcagttttctctttaatgcaacatcaacattcattgactgtgggaatacccttacctgaaatccattagttaaggattttgcaaatattttttcaaatgtaatatcaagattgcctgtaaaacccacaccacttacagtgtgaatacagccaattccatgagacgcctgaaaatcaatggcaatctgcatattcttaaacagttcaataatagaaagtgaattagtaatgtaatcagagcatgcaaagaatgcctcctgattcatctcaccggtatcttcgtgataacctcttaacttacttactttccccttcagcttatcaagaagcttgctgttaattatgcacgcatgtccatcatatttgacaaccatgatttccttatcagggcataccttatctaattcttccctgcttataagtcttccttctttaactgaatatggtgatgcaccgaatgctataagtgtctttttattaccgcttgactgcacgaattctttaaccatctgtgcaatctcttcattggactctgcatccataacattaagtcctgcgtgaaatgtagaaaatgatgccatatgctgatgtgtatctacgaatgccggaaccagcaccttctttccaagttcaactatctgcacattcttatactgttctggcagttcgttaccaacatacacaattcttcctttatcctcaacgagataaccggctactgtatcattgctgtcaactgtaagaacctttcccttataacatatcatagacattcaccttccctttatatctgcatttactgttcctgtcccggataatccttataagaagaatctaactgtaccagctcataaaaattatctatctccataatatctgatttctcacaaggtcttacctctaccgcatatctttccttgcgaagtactaatggaatgaattcccagaaataatcattaccctccggctcttcattatatacctgtgcaaagtcttctcttaatcttgcactgtcttcctttgtccagtaagatattccataataattaaagcaatatgtattacccttctggtaatctgttatatgtccattatcaagcttaaagctccagtcatcagtctctaatgaataagagccaaggatattgctgcagtactgatactttgtgataatagccggattagatatatacaggtctgcttcacataaatagcactggtcaatatgttctaatgctgccattgctgatgatatattattggttttatcatatatatcgttatcaataagattgataaatggatatttatcaagaatctcatcaaatttttctttcttataacccctcacaagagttatatccttaattcctacagaaacaagtgcatcaagtaatgtatcaataattcttactccattaacagcaaccattggctttggtctgtctaatgtaacaggaaccattcttgaaccaaatcctgctgccataataaccgctctctttacgcggtatggctcaagtgcctcaagacctttttcggtaatctccatctggtcttcacatcttttaataagcacatcattttctaactcatcaagtgccttggatatagctgttcctgaaatctttaatgtatctgaaagagttctcatcggataatctttcttaccattcttttcaatatatgtaagtacttcaaactgataacgattcatatttcctccttacagcaccattggaattatatagattccaagtgcaatgcatgtaacaataattgtgcataccttccatatggtgtactgtctgtccatcttagccttagtctgctcatccggctcttctataacgccaatttcttcctcaattgtcggcataacacactcttttctgtgagaatatgcaaaataaaatattacacataatactgttatgattcctgatgtaataagtgctgccttatccgcaaatattaacatgaagcaatacacaacaattgtaaatatacatccaacaactccaagaggtgctttataaggtctcttcatatcaggatacttcttcttaagccccatatatgaaagacagcctatcatataacatatagcaagtgatataagcgatactgacgctatgtaattaattgaacctgttgcaataagtataaaattgataacaccaaccacaataacagcaacatatggtgtcttgaactttggatgaatctttccaaggaattttggtaatgcgccatcttctgccattgtataaatgtatcttgcaggtgcagcaattcctggattaatagtagataaatcaccaccaaatgcaataccgatacataaaagtataataggaaatccaacaagtccgaccgccttaagtccttctgcatatggagcatctgccgctgcgagaattccataaaactccttaggtacaagacctacaagaaaccactggaataatgcgttaagtgcaaataccataaataccgaaatctttaatgctcttggaagtgtatactgtgggtacttagtctctgcacccatagatacacatgtctcaaatcctgtatagcaccaccatacaagaccaaatatatacatcatctcattaaatggaggcaatgagttcattgctattccaccaaaatattcaacatgaaccttaggtatcatataaaggaaccagcacactgaacagccccagaagaaaaacataaatgctgtctgtgccttacctgactgctcaatacctctgaaattaagaataaggaaaactgcaacaaggataatagctataattcttgaatcaagcttaacaatgcttattccaagctgttccataagaatcttaaaataattggcaaatgcaagcgtctcacctgcaccaatagctacaacagatactatataatgccatcctgccatattagcccatactctgttaagtcctctcttggcataattatatgttccacccgcacaaggaagtgctgcagacatctctccatatataagacatggccatatagatataagaagtgcaacaaatgtgaatcctattatccatgatcctacacttcctatctgtgctgaaccacaggtaaaaagtcctacacctacaactgttccaattgtcatactaattgattctttaagccctaaagcacgaaccagctgattattctcgttcataaatatcccctctcacagtttattcattcggtcatatttttgtccatctgcgtgaacaaaatggattatatcagataataaactaaattaccagtataaaagcaacagctataaaccttccatggctatagctgctgcttcatcatcaattattaatattcttcatctgctgctcatctttaattacagatatctgtggattaacagcgtacccatctattctgaacaccgaataatctctgtttttaagatattcatctgccgggtacataccttttgacacatcccatggtgcaacatgatatcttgactgagaaacaccatccatatcaaaaagcgtattcccataattactcttctgtccaagtgctgccttgccataagtagcatacagattcttaaatgttacagaatctgaattaacctgcattacatcattatgagtatcagccattttcacaaatacagcaggacgttcatacaatctatatccgccgtggtcggctgtaattataactgtgctgttatcatacacacctttatccttcatctgctgcatatattcattaatatatctgaacacaccctgtatctgcttatcaagagaagtctctgtttctcccacatctacacactgttcattcatctcataaggtgcatgtgcccctaccatatgatacagtgtaaatgttttatttccagcatcaactgttataccgccattattattaaaatcagcatacaactgtgaatcatccagttcatattgaataatattgttattctttggagcctgacatgctgcaaaatcatcaccataaaaccagaaatactgttttataatctgtggaaatgcatagaatgccgacattttatatatattcttaaagaattgaactttgtctgatattctgtatttctgtccacctgcagtattggctactgcctcctgattaactccattaagatactcacttgaagtatacaacttaacatcatatccgttatctgacatgtcctgaataagcgaaccttcttcatatgctttctttctgtaatcagccagtgactgtgtggtatcatactgataacctgtaagcataagtggaaccccaagtgctgtaggtgcaccgccgcctatcatattatcaaaataagtaaaatcctttagctcttcactgtatctgtcaataacataattctgtgcatcatcattatcaagtgtatcaacaatgaataccaccacattgccctgcgaagataacgcaaactcatcattctttgtaactacatatgaataatcaacagttctcttagaagccactataagcactacaagtgtaacaatctgtatacttgaaagaaacaggctgccccacttcattatctttgtcattatatctttcttaaagcatacaacaactgcaggaacaactataagtactatccatacaactgtacttattattgcatttaccctaaactggctccactgaatctgccttccattaaggacaccaaaatccggattaagaaaattcccctgcacataagcagctaatgcaccgccaaatatgaccgctgcgtatatgttacatatcttctttggcacaatcagacctatcagtataacaactgctgccgtaattaacgatgctgctataagaagcggtataagtgccgtgaaacctactgcaaattcatcaagattaccaagaaataatgatgccggcataaatatacagaatgttacaataagaaatatcaattgaggataaatcgttattaatttatcttttatcttcttcatagtaatctccctgttagttagctgccgctttcaatgaaatttttcttacattattaaaaacatgtagcccacatattattcataaagaagtatgacattatactcactgctgctactgccatagcatttttattaatttttgttgtcacaccatcgacacctataaaatatgccattgggaataacaacggaagcagatagcgtggctggcatcccgcaatatagtctgcaccaactgctgtgaatgatatatataatgctgtcgctaccagtactacacatacggccgcactaaagaaatatgaagctcttacatatggcattcttactttctcttcacctctgtctatgtacattaacgctgcaataagcattaatgtaattgcagtaccaattccatatcccatatatgccatagaactaataaattctgaagcataatcaaggttaagataatctttcagaaaatttaataatgtacctgaatactctataggatttgaaagtatatactttatctgttcagttgaattaacatctgatccacctcttgagtctcctgttcctggagaattaattaacatcggcagaaggaatgtcatcataaggaatattgccacacctacaataatagaataatatatccttctttgctttttatccttaaatttatcaacaggcataaataaaagaacaaacattataacaaaatatattgctttgggagctattccaagtaaaaagcatatattcatcattataatatttctatattctaattttttatctctattctgaagttccgaaataaagaatgaatatcctaatgttgtaaatccaataacccaaaagtcatatgacattgaagatgccataaacattgttgttgtggataatccaataacagccaaaagtactttaccattttttagtttttttattgcgaaatacattaataaaacatatgtacaaagtatcaccattttggatagcaaaaatgtatggaagaacgataatctgagcgcttttcccataattattccaattgcagcaggggtataagcaacaaactcctttcccacttcacttccaaatctgttatctgtacgtttctgttcatactgatattcaacattatcaagaattgccttaaactcttcctgtgttaaatctccttgtgtatacatatatgcagcgggctgagaatcatagaataaaccttccgcattaaacttagtattatcaaaaacatccgcgagagaaacacttcttaaataatgtgtctcatcatcccatgtcacaagtaaatgtcttggtgaaaccattatatatgtgagtcccattattaatgctgctgctgcaaataatacttctacacgtttatatgctatcttgccacataatacaattgcaaaaataagtattcccgttccaacgaaaaaatacatcctcaagttagaatatccatcataaattctactgaagataattttctccaataaaacggcggctgctattataatagcgaatatgcaagtaaataaaagtgtcttcttccaatgagcagcaagatactttatctgatttatcttattagctatgaaagtatctatataatcagatgcagcttttatataagtcagcaataatggtatacatataacaccaaatatgcttattacaccaacaaacaatttatttttccatgtactgaattctgaccagtacatagctctgttaaataaaaataccagtatcagcattattataaaagttactataagtttttttcttttgttaatcattttaacttctgacattatatcctccaaataataccattaaacttcctttgttatttcacccgattccttcttatcattagcataactattcaatgcaatctcctgtaccatctttcttactctttccgagtttcttgaaagcgacattgtaagcgagaatataacaagtataataaagacaaaccctaaaaagaacaacatattaatctcattatatattcccagtgcctttgatataacattaagaagattaggtattaatgtaattattaatattccaacctccagaaaaagccatgaaagtgcatattttaattccagtttgttcttcttgataagacctaatatctttaacagtcctaatataagaacaacaattataacgcatttaattcttatactcatctatgcttatctcctctgaaattctcaaacaatattgccagtgtaaccttaaccatataatatactgatttcttaagtgttattgatgagcttccgccctgtctttctctcatgacaactggaatctcagccaccttgaaacctttctttaatattgccacaactgtttccggctctggataatccttaggatacttcttggcaaactgtactattgtacgtcttcctataagtcttaatcctgatgtagggtctgttatcttctgacctgtacataactttatcaagccagtgaaatagttaattccaattcgtcttgccttagatgactggaatccctgtttttctatgaatcttgaacctataaccatatcaaggtcattcttttcaagataatcagccatctctccaaggaatttcgcatcatgctgtccatcaccatctacctgtacagcaatatcatatccatatctttctgcatacagatatcctgtctgaacagctccgcctattcccagattaactggcagattaacaatattaaatccattatcttcacatatctgtcgtgtattatcagttgagcagtcgttgataactacataatcaaatgatggtgcattctctataatatctctgactgtcttctctatactttcgctctcgttatatgctggaattattataagttttttcatattttctccataattgtccatgctttaaatatcaatatctttcagttcctcatcaaatggtccgaactccagaacctcaggtacatgattctttctgctctctactggtggcatcttcatataatcgccaaacattctcttaagaaatacatcattattcttagggactttaaccattatatcttcaaatggcttttcaaccaatgggaacaggtcatctaactttatagcctgctttaaaggatccatctcaccaaagaaacatgcaacccatcttgtcttctcattgttatacttaagtgcgctcttcatataacgtctgttgatgaattttcttgagaaatgtgtccatgtaagtaatctgttcattactatacacattgcacttacaacttttctcttccatccatgcatgaaaagcacaggtttcttgaattctcttaatattcttaacttgctccagaagaatactgatgatctctgtcttcttctcttcttggcatcatcaggaacattatcataaggataaagcgcaatatcaattcccataggaacattagcatccttgaatacatatggtatattcttagttccaattcttgctatctctgcattatagaaaggaaatgtttcctgtgaatctatatcaagaactacatacttatctgtatatttctctctatatatcttcagaaccttctcataatcatctctgagcattccgatatctatatcatcatcccatggaataaatcctttatgtctctcaactccgattgcacatcctgcaaacaggaaatatgaaagtccgttctcatcacatattttaataaaatctttaaacacctctaattctgcaagctgtaactttctcaaaacctttggatcatactgttcattctggctcattgtctttttctatcctttctaatctggtataagatatatcccatcaataatacgcctaataacacaacaagtatcagatagccgagtgcagctccgttaagaccaagtctgcctgtaatcggatccataataatcagcgcaactccgcatacaataagatacagaatagtcatgtatttctgcttacgcattatggcaagtacataatagaatattatattgaccgcattaacgcctccacataacagaagcagaagcagtgtcatcttgtaatccttaagattaacaccataaagccatgacagaaccggtattcccagtatatatgccccgacctcacatataagtgtaaatcctgctattatagcaaacatcctgaatattatgtgccagaaattcttatacttcttctcataataattaacagccattgatgtctgcatcggcttaaatattataccactaaacagattaattaccatattaggcatgaataccgccgtataatacagctgtgctgcatcacctaacattctgtcaacagataatttcgatgaattgataatatagttacttaaaaatgtgcttatagcaagaggcagacacactttaaaaagtacgaaaactcttctgtaatccctgacaatacatatcttaaccctgcctgctgcaacagatgcatcaagacacagaattataagcaatgcaactacattcatacatatcagagagaatatcagatttcttgttataattactgttacaacaagaaccagtatactgaagaatatcctgtaaaactctgatttaccggacatatctattctttcctctttctggaattcaccttcaaatgtatcagctaccgaatcaagtatcttatagatacatacaagcaatataacagtaactttctccggactgtagccgttaaatacaacgtatactatgcttgccagaaatgttataagacacatcataagtcttaaagtgaaataatatccaaaaggatactcattcttaacatcagtaacctgatatgttcttatttcgaaataggctattgtaacaagccactgtgcaattgaaagaccaatcgagaacattcccgctttagcctcacctaagaaacggcttataacaattgtcataacaagcgtggcaagtgcgaaacatgctgttcccattgtaaaccagatatatttgtacttatcttctggtgtcttatccacacccattattcttgaaataatattcatatatacctcttagtctttaaattccaatttatatgggtaatgattctttctcttttcaactggaggaagctgcatataatctccatacatatttcttaacttctcatcttcgttggctggaagaggcatcttaatatcttcaaaatcatacatctgtaatggatatatctcatcctttaacattatatgataatatggatctgtatcaaataagaatgccattctcttagtatccacatcattatatcttgatgcaatctttaagcatttgccagcaatccagttatgtgaaattctgaacacaacaagtccggcatgaataattgctgttgcaatatgtgttatcttagccttaactcccttataaggaagtaccgggaacgcaacatgtctgagaataagaagcttgctccagaaccaggcagctttagcctgctttttaagttcttcctcatcatctgatatattatcaagcggatacacatcaaggaatattccaagatcacatttgatattcttaagaggttcctctataaatgttgttcctttcatcataattcttgttgtcatcaatggataattcttcattgtttcaacattggcaattgaatacttatcgctgtaatctcttttaataacttccatcatcttgtcgaaatcttttctaggaagcattacatcaatatcatcatcccatggaatgaatcccttatgtcttattgccccgattcctgatccggcatcaccaaaccatgtaagattattctcgtcacacactttgatgaaatctctaagaatttccatctctgtctgctgtacctttttaagggttgcctcatcgtattctttcatcgttaactcctatccctgcttcatattattagattcttcactcttgctgtatgccttagtaagcattttagcaatacatttgggccagaacttctgatacataatgtaatcttcttcagatctcttattatcattaagaatcttagttgtctctgagtcctcatgtattctgtgatatgtgagtatcttattacagaatataaagtctcccttaagctttgataatctctcccatgcttcccagtcttcatcagctctgaatccattaaggaatacctgcttcataagattaggtctgtaatatgttgctgatggacaacatattggtgagccaagcgataacactcttcttcttataaatctgcttccccacattgcctttggacgcattatgaaaagcattattctctttactttaagaatcttattggttgttacaatctcgccatttcttatctctgcataatcggtaaagaaaagcagcggctttttagctttagctgtatacgctaacagattctctacatattcaggcgcatatttatcatcctgatgagctatagtgacataatctgtctgtactttagaataagcaaaattccaatcctgtgtaattccgctttctccctcattgacatacacctttaaattatattttgctgctatgtcgtcaatatacttattaggtgtagatgtagcaataaatatctctgactttacagtctgttccataagtgatgtaatacactcttcaagatatggactctccttataagcgcatatcgcaaatgtatgattagtattgacatgttcctttgtcattatagttcctccaaacgccttgttttaagcatatgtattttcatactatcttctacagatactcattctttccttcttcacgaagctttgcaagcacctgcttgatttcgcctgcattctctttagttgtaataagagttgcatcattagtatcaacaactacgatatctcttaaaccaactgtggcaataagtttttcgccaccttctattacacagcccctagtattaactgcaactacattgccgttaattacattgctgttatcatcattcttcttgattcttcctactgcaagccatgaacctacatcatcccaaccgaagttgcctggaagtgtgtagatagaatctgccttctccataataccgtagtcaactgactgtgactcaagattagggaattctgcctcaagcactgcattttcatctgctgttccaactgctgccttaatctttaataagccttcatatgtatccggcatgaacttcttaaagcagtctaatattgtagataccttccatacgaacattccactgttccacagatatgttccgtcagcaaggtatgatttagctgtctcaaggtctggcttctcaacgaacttttcaactgaataagcattattcttcttgtcatcctgattatacttaatataaccatagcctgtctctggataattcggagtaatacctaccgttacaaggttagccccctcttctgcaatctgaacagcttctttaaatgtatctgcaaacacctcattattcttaataaggtggtctgatggaagtacaatcataactgcatcatcatatttgcttgcaacatgaactgctccaagacctacacatggtgctgtatttcttccaacaggctcacataagatattctcctctggaatacctggaagctgctgctttacaagttctctgtagttcttgttagtagcaacataaacatccttaatatcaaccaatgggctgattcgctctaccgtgagctgtatcatagtctttccgtcatctgtaagagaaaggaactgttttggcatattaacacggctctttggccagaatcgctctcccttaccacctgccataataagtgctgtagtcttcataaattcctccttgttctgccatattgttttaaccatcaattacgacatctgtctgtgcatcataatatttaccatcagctctgatagcacatctatatgtgccgctttccatatccgttgtatctattccacaaaaaaacggtgcatagttaatgttcttatccacaccttttcttaaatgaaatactctgtcacatactgactgtaccttaatcctataacaattctgttcattccacagaaaaattacgggattataatacactttatttccgttatatgcaaatcccctaagctgcatatcatcatgataccctgtttctgtcaccttaactgtaggtgatacttccatatatcctgcagccggccttaatctgtcagctttctgaggttttctgtatattacagaatatatctcatctccgaatctgtagttattctccgtctgcgtaagaagcggactatagaaagggtcatatttctcaagctttggatgtttttcatatgtcatatcccttgcatgcatattacgtctgttcttttcttcatcaacctcatcatcacctcttgagaatgattcatggtgaaaaaggaccacgtcatttcttaagacattgtaatatccctgttcatacaaagtcaggcatatatcaacatcattatgtgttacttcaaatgcttcatcaaatccaccagctttatcgaatttagccttctcaatcataaagcatgctcctgtaacacacaggcagtcataatcagcgtaattcctgtgagccttgatattctcatcatcaactgccttcgcatacagatgtgcaaaacagcttgattcataattaattacacccacatgctggatatatgatgagtccggatacagaagctttgcaccaaccgcgccggtactttcctgctttgcctgtccgacaagtactgaaagccagtctgtgtcttcataatcctgtccgattatttcaatatcatcattaaggaacagcaacagattaccttttgctttagctgctccaatattacacatatgtgagaaattaaaatctgccttttcatacacatatgatgcctgtccttcaaatgtatctacaagcttctcatactcttttctgttgctgtcattacttccgttatcaacaacaacaatttcgtaattaatatatttcgtgaacttgcggatactctgtaaacagcattttaatatgtctggattatcctttgatggaataattatactcaccagatcatattcattcgtaatataatgcacatgctcaactgctgaatcatgcttatctgctacgatgttcacattaatttctgaactttccagaatcattttcttaaaagctgccattccgtcatcagcagtcctgtatgatttactgtcagttcttatgtccttaacaagcacttgatggatatgcccaacatctgacgtcttacactttgaaagaattattaaagacaattcataataattaaccttactgccctctccctgattcttcatacatccattaattgcatcaatcagcatattcttttcggctgtaaaagcatttccaatataattataagacagcagcgtatcccatgaataatcgggcttacaatttggaagcatacatccagcttgcgaatcatattgttctgaatctgtgtatacatagctaagatttcgcccagcctttttctgagtccttatataatgcgatacaatccctgcaaactctttatcaaattcacagttttcatcacacacagcaatatattcagcattcatgccagacacttctgccatcaggctttcatagttctcacaatgactgcatatttctacacaatctgccttattatcagtaatacgctgttttggtgcaatatttttctgataattgccataggctttcacatctgtcatattctgatgcatcttctggtgtaatgcatatccgaatgtcttaaagccttcttttccaataatctgcgctgctctcgttaaaaacatctttacctctaataattactctaattccagtgtatatgactctgtattaagagggaaattcctgttatagaaaggatctccttcatctaattctttctgccatttactcttgaacgtctcaatctcacccttgaatcttaactgcttttcttcagtatcctcataacctcttgacttagattcataatgataccactgtgaaaatgcgtcataaaccacaagatatcccttacttctgactttcatacagaaatcaacatcattgaatgcaacagcatattcttcacataacccgccaacttcgttatagatatccttggatatcataaggcatgcagccgtaactgcagaataatcgcttgaaagatatgcccttgacatatatccgtactggttagcatctaatccaataaatgcatgtcctgcaattccaccaagaccgataattacaccggcatgctgtattgttccatccggatacaataacttggcaccaacgattcctacatccggacgcatgcagtaaccaagcatgtctgatatagaatccggagcaatcatctctgtatcattattaagaagtaaaatgtaatcaccctttgcttccttgacaccaaaattattaattgcagaatagttaaatccactcttccacatcaataccctgacatcagaatattctttctgaatactgtcataatattcaaatgtttctttctgcgtactgttattctcaacaataataacttctatattcttataagtattgacattaaacagtgaacgtacacatttatcaagatcatcaatatgatccttattaggaattacaattgaaacaagaggatttcccggtgtttcatatataaccctgcttcctccaaataacttgctaagttcaaccttacccggtattccaagtctcttaagatgatcctcaacagcctttcttcctgcttcatggcagtatgccttacttgcaggattagctgctgtagaattatcatgcattctccaatgatataatatcttggcaatatgcctagtcttacgggctttttctgtacatcttaatataacatcataatcctgtgccccgtcatactcagccttaaatccgccaatttccttaagcagctctgtcttgacacagaaaaaatgtgttatatagttatgtgatcttaacaaatcaatattgtaatctggcttaaaattaggatcaacatttatccagtctggtcctaatatcttatcttcatctgtatatacagcatcaacaagcttatcctgaaacgccttaacaacttcatataaagcatccggttctaatgtgtcatcatgatcaagaagacctgttatctcaccatcagccagttcaagtgctacattagtgttgcctgcaattcccttattactatctaacagcttatatattattcttgaatccttattgtgatattcctcaagaaccttctcaagctttgcatttccgcagctgccatccgctatacacagctgccagttactatatgactggtcaatcactgactgaatcatctcttcaagatacttaacaggtgtattgtatgttggaacaataatacttatcttaggttcataatcaaacttagctttcttctggttatccagttcttcctgtgtaactttatgaattgcaaaccatttcttatatatctcagcctgatccatgacaccatataatccgccatacacatactctttaagatctttgaatccatataatcttatatgatggcagagacgtgcaacattatgtggtgtgatagccttaatcattctcttagctttatctatattgtaaactcttctctgtcttttaatctcttggtctatattaatatcaatattcttagcatctgacttaaaatgtaatacatatcccggtttctcgtctattgtaatagtaaatccaacggctttcttctcatcttctgtataaccattatcaattaagtcaagacgctcacaacgcatgttcttgaattcaagcggattattattaacatctgtcatgtcgattgtcacatcgccttcctgtgcaacaccccatcctgctactctgtaaacatgcttatcatcagtagtcttttctggccatattctgtctatattatactgtaatatctgatcctgtattgtatatacaacatccttttcatcagcactcgcaatctggcttcttacccccgcatcaacgacatacagttcaatactcttaacatcactcttattaacatctgctttaataatgaatcctatcttacagtctcttttaagactattacttataagaagatccagcttgtcctctcttgttatatgctggatgctacactctgtcttttccccattaataaataattcaaatgaataatcatcaaaatccttaggaatataccagcctgcaattctgatatgaagttttccctgattatctgaaagctgtatattaattacattatcactctttttcatagccactacctttcaattaacagttcttccatgtatgttcaattcttgcaacacccatatcttcaattcctgatacaacattaaatcttactgcttctttatagtaatcaattggtgttccatctgctttttcaagcacaatatctacccagtactggcttcttgtaagtgtcatactgtcaaactcaataacaatctttccatctttgtcaaggtcaaatgcatcaagtctgtctatcttagtactgcttccgctgcataactgaccatcaattctataaatcatatatcttgcatgaacatcttttaccggagtctcaacagaataatctatctctatcacggcttttcttcctgtttcaagagtttctgtcctcttgccgtcatcacaagacaagataacgtcattaattcttgcctcgaaacttccgtaacgtttatcgttaccgccttctttattatcttcctcggccttcttaagtcttctctgctctgcttcaattcttaagattctggctctctcctgctcgtccttgcttaatctttcctgattcatataatcaagataagcaatatcaacctctcttggatcaccttcctgctcaatctgaccatctttaatccagattgacttgtcgcagatttcttcaatctgtccaagagcatgtgatactataataatagttgttccattagccttaatctctcttaacttattgaaacattttgcctggaaattcgcatcaccaacggcaagaatctcatcaataagaagaatatctgcattaacattaatggctactgagaacgcaagtctcatatacatacctgatgaatatgttcttacaggattatcaataaactgctgtaattctgaaaactcgataatatcctcaagtctttcatctatctctttcttagtaagaccaaatatcgccgcattagtatatatattctctcttccactcatatctggatgaaatccggcaccaagctcaagaaggctcgatactcttccacacatctcaatagaaccactgtcaggatatataatcttggttaaaagcttaagagttgtactcttaccacagccatttcttccaataaggcctactgcctcacccttctttactgaaaagcttatatcattaagaacaactctgttttcatatctgtttctcttccagaacagcattttctctttaagttcattgcccttatcaaaatacactttaaagctcttggatacattccttacttcaattgaattctcattgttaagcatacttatctcactttcttaaacattaaaactcttctgcgaatccgcgctgaagtcttctgaatataattgctcccagaataacaaaaacaacgcctgttataattgcaaccaataatgtagacaaatccggaatctgcttataataaagaatttgtctgtatatattgatgattggtgtcattggattcaaattgaatattgtctttaatatctgtggaacattagcattctccaccatatcaacgccgtacataactggtgtcatgtactgtaatgccataactacaattccaagaatgtactgtaaatctctaagatatacagtaagtgcagaaactataagtccaattccaagacataatatatattcaacaatcattacgacaggaagatataataatgcaaccggattaattcctcttcctgagaaaataagtacaataaacacaacaacaaatgtaagaatcatgttaatgaatgcacttgttactgtagatattggaataacttctcttgggaaatatattttcttaaccatgttagattcacgcattatacatgttgaaccatcctgaacacttgaaccgaagaacatccatggtacaagtgctacgaaaaggaacagataatactgctcataattagctctcataattattgagaaaaccagtgtaaacactaaaagctgtaacagtgggttaataaatgtccacataaatccaagcattgagcccttgtatcttcctcgtaaatctttcttcaccagagaaaatatcatctctctgtattcatacatttcctttaaatgtttcataaatcctccatttaattatggctgttagaaattcgcatataagaatccgcttccagcgtcacttgcgtatcccagaacaaatattgctactataataccgtaatatataagccatcttacggctattggttttgctgctacggcagctcttatctgtactcctctttcctttagaatgcttattattaatacaacaatgcatcctgctaaaagaattatgtaatcaaccgatgttaaaccaatacacttaaacatctgtgcattaagctggtcaaaccttaattctgtaaacatccgctttatcattctgattgcagaccccatacctgctgcgctgcaatcaaatacccatccaatattgacaagtataaatgttcttaatacctgtacacactgccaccacttcttatgtggatcaatatgacatgcatgtaaacattttttataaagaggttctgcgaggttactgaatgctattatcacgccattatacataccgtacatgatataacgccattctgcaccatgccatatacctactatgaagaatatcagaagattagaaagacatattgggagagtctttccaagatgatctccaagatgcttcttgccccactttccgaacttgttcatagcctttgataagcagaatggatagaagacataatccttcatccatgtacctagtgtaatatgccaccttctccagaactctccgattgatttactaaaatatggctgtctgaagttctcatccatagttacaccaaaaagctgtgcaacacctattactatatcaataccgcctgagaaatcagcatataactggattgaatacataagcaccgctattattgccattgctcccccgtattcatcaggcttgttaaatatcattgccacaaatactccagccctgtctgcaagaaccatcttcttaaacaaaccccagaatattctttgaattccaaactgtacattctgaagattaaatgcattgcctgcaaaaagtgttttcttcagcttatcaaatcttccaataggtccctgcataatctgtgggaagaatgatacgaaaagacatatcctgaatggattcttttctgctctgtattttccctgatatatatcaataacataagatattgactgaaatgtaaagaatgataagccaagcggcattacataattgcttaatgcatacacagtcttatcaatacctatcttgttaaatactgctgtgatattacctgtgataaatccaccatattttaatactgcaagaacaccaaaattaataagcattgcaataacaagaattattctcttcttatgcttaacagaattcttaaatttcttcttctgttccctgccaatctctgccttgtgttctttcagatatgcatctgacttatcctgtatatgttccattgctagtgccgcaagatatataaccagcgatgctgcaaccatgaacagactattcttcgcattgaatgaaaaataatacagataacttaacaccagtaaccagatccatcttactttagatggaagtacataatatataactactccaattaatataaaaaaccaaaataacgctgttgtaaatgacattttatttctccactaccccatataattccgcttcagtattgtacatttgctgaaatgaactgtagaaatatttattaatatctttagttccctgtttatgttctttaataactttgccaagaaattctgaatattcttttgcaaattctccattcatatgtccttctttatcaacaaaatccgaatcctctcttggcaatatgtcctgtctcgccatattaaaatcataataaaacaccccattgtcagcaagcagtttgttaattgtatcatggacattttccatgtgaagagttcccacactgctcggagttattggagatgttaccgcaatcaggtcaatatcattgtctctgcaatattttattatcttgttaagatatttcagaggataacctgtaacctgctccttgcttcttttactccagctttctataagcttctgtccggcaagttccccactgacagggttaatatagaaatatcctctgccggcatatgttccaccgtctacattgagtgaacttatatctgcttctttgtattccttagataacttctgttcgatattttctttcatattagacggagtaaacgtacatgcctgtcttcttgtgaaaacattccttatctccatacgcttcatgttatcatatatatattgccattttacatatgaactccaatccatctgacattgaataaactgttcagtataaaacccttctttaggcggattgaaataatactgataatctatatccagaattactgtcttaatattattagttctgcatgtctcttcaagtatataatatgaatcttttaccgtttctcctggaatagccatgtttattgaatatgttccggaatatttatcaataatatccggatctgatgatgcccttgcatgtgaagctccaattatgacagtatcgtaatcagttttattatttttcacacatacatttcttaaaatataattaacatagcctgtctgtacacaggcaaaatcaatgactcccattataacaataagtcccgtcaggaatatcacacatcttagtattggtttaaactttttcataactaccttctatattgtttcttataatgaatatcaactgttgataatattactaattaatgatcttgtaaatcagttttttccatgtatctttcttaacctctcactgacaatatccgcagaacgcttatacgccagatgttccttagcatatttctgaccattcccagcaattctttcgtagaaatccttatcctcataaagccttctcatatagtctgctgcctcatcaacatgtgcatcagcccatacattgcccttcttgaacggctcatagtccttatcaagctctatcatgtcgtaaccgaccatgcatgctgtgtcactgttcataaactctgtattgcctgaccagtcagttgcaataaccggtgtaccaacatacattgactcagccataacaagtccgaagccctccgaacggtgaagtgaaacatacacatccacatcggcaagaagtgtattaacctcacatcttcccatatgaccgcacatataataaatgttgtcgcggtcctctattacagaaccaatgattttttcatcttctgcagataattctgcctcgcttatcttgataacaagtccgacatctttatattttttccttgtctgttcatctttgcagaacgcttctttaaatgctttaattgcagcaagcggattctttctttccataacgcttccactgttatacattacaaggaacaggaacttgtcttccggaagattaaaatgctttctgtcaaacttcacagtatccgtctgcggtgcaacacagtgcggaactgttattacaggcttgtccgtgtatttcttcaaagtattcgtaacgaaatcagatggggtccagacttcatcaacaagcttgaatgccggaagccactcttctggaaatgtctccagctcccatgcccagtatcctatgttatatctgtaatcccatacttcttttccaaggcttaaatatgctaccatgaattcacttgcattaacatgaataatattcacatcaaaaggaagctcctctgtaagtctgtcagcataagtatcattgcttcttgaacctcctggtggaacaaagaaatcccttataacatgaggttctttattctcatcaagcagcctgcacataattcttgcgctttgtccaagtccgttatctcccttaatattacctattatattagcaccacacttgtatcttcctgcctcatatttttcaatagaatcagccgacagcttgtctgtggcattattaattatccctgctttcatcttacttaaaagcttcataggaataatctttgtcagcaccggtctcaatgcttctcccgtattaagaaaaaattttgataaacccatataaacctcaacattctatctgttattcatctggctgttaataaagtctctcaccataccaccaagtctttccggtgtatacttgtccaacgcatgtctgtatgcattctcatcaacaagtccagaattaatcttcttatctatattcttcattccatttgcaagacttataaccttatcatcatcatcaccggcaagactgaatctttccacacagtcacctactacctcgttaaatattttaagattacttgcaagtattggcttattatgcttcattacctctaatataggcattccgaagccttctgccatagaaggaaacacaaagcatgaacaattgttatacaggtcatatcttgtagtgtgtgatacataaccaagataagtaagaccttcaacctctgtaagtgcagtctcaagaagctgctcaatatcatcctcctgcatcttaccggcaagaataagaggtcttgttccgccttcttccctgtatcttctgtacgctttaataaggatatcaacgcccttacgcttctccatattacctacatacaagaaataattctcatccttaggcggtacatatcttgtaagcggattagatataatgtaggcattgcagcttggaatcttcttagcctttggaaaatacatctctgtatcatccttagtctgctccgaattatacagaatcatatctgtatgtcttaaagtcacaccaagattaaacttaaaataatagctgtatatttttccaaagtatcttacatactgaataggaaacatatcgtgtattgtaataagtgtcttaaagcttccactaagattaataggtataatcgaattaacctcccagaatatatccggtttcacctgctttaattccttcttaacaaatgcaaaatatgcatacactccgacacttttatatacaggctttccccattcaataaccttgattcctctagcctcaaatctcttaatatattcactctctttaacatctgtaaaaagaatccattcaaattcatcatatgttatgagctgttctaagaagtcattaagatacatgcccacaccgcttggtctgctgcctaaagttcttgcatcaacagcaatctttaatttcttcataactgtattctctgcccccaataaataatctttcattctatcagagtatttccataatatgcatgttcaaactatccctgtaacaaaacatgtttcttttgattttaccatattatagatataattgctatacattattttctacacacaaatacaccagcctctttggttattgtcataggtttcacaagctttttctctacatattttttaaaatctgtatacttatccacaaggtactctttctgattgccatgacatgatagtatataatctaccagcggttctgcttcatcaacaacaagcgcatctttataatctcttctctcaacatctgaaaaatgtttttttaatatcttatctccattatcaagtccgaatttttcaaaaagcttatctgcttcaagtgcaattctcttatcatatcccgacacaaggcggcttatctcctgcatatgcctgctgccatatgtactgcacacaagcactcctccaggctttaacaccctcacaatttcatcaagtgccttattgacatttttacaataaaacagcacatgattagcaatcaccagatcatacgattcatcttttgcccctgtcttttcgcatgaagccactctgaacctgaatgacacatcaatatctctttccttccagctctctgttgctttttttatatttcttctcgcatcacttatcatgccttctgatatatctgtaagctctatatatatgttttttttcttccctgaaaattcatttctctttcctgtcatggcaagctgacctatattgtcaacccacaatgttccatccccacacccaatctcaagaattctcatccccttaacaataccacactgctcatatacccacggaaaccatccctgtttattaactgaaaaccggttatgaagattaattcttgcagatatatttccagcattaatgtactgattcttcatgctgtcttccatattagtaagatggataatctccagcatattactccagtcaactcctttgccctcattaatagagtcttctgtttcttcaatagctttacacacgagctgcatctgtgcaatcttatcctgtatcatacgcttctgaagttcaagcgaattcttaagcacatgataatctgaatcaccaattgtcatatttcttatatcatccagtgtaaatccaagatatttaagcaatagtatctgctgtaaccttgtaaaatctgaatccgtataaaatctcactccctcatcagtaagaagtgatggctttaatatgttctgctggtcataatatcttatagtccttaccgaaacatttgctttcttcgcgaattcccccgaagaataatatccctctttatgcatatattactccttgtaaaaatttttcaaaaaacacttgaaggtgacgcagcgtcaccttttattatatacatgacttaaaaaatgtctacttgaaaattaacataacattttaacaaacaaggaggaacttcaattatgaagggtattattttagctggtggttctggcacacgcctttacccactcacaatggtaactagtaaacagcttcttccaatctatgataaaccaatgatttattatccactctcagttcttatgagtgctggtatcagagatattcttatcatctctacgccacaagatactccaagattcaaagagcttttaaaggatggaagccagtttggtgttaaccttacttacgctgtacagccaagcccggacggacttgcacaggcatttattattggtgaggaattcattggcaatgacactgttgccatggttcttggtgataatatatttgcaggtcacggtcttaagaagagacttaaggcagctgttgagaatgctgaatcaggaaagggggcaacagtatttggttactatgttgatgatcctgaaagatttggtattgttgaatttaataatgaaggaaaggctgtctctatcgaagaaaagccagcgcagcctaaaagcaactactgtgtaacaggtctttacttctacgacaacaaggttgttgaatacgctaagaacttaaagccatctgcaagaggcgagcttgagattactgatcttaaccgtatctacttagataagggtactttaaatgtagagcttctcggtcagggatttacatggcttgatacaggaacacatgaaagtcttgtagaagctactaactttgttaagactgttgagactcatcagcacagaaagattgcatgtcttgaagaaatcgcttacttaaacggctggattaacaaagatgacgtcctcaaggtatatgaagtattaaagaagaaccagtatggtcagtacttaaaggatgtcttagacggcaaatatgtcgacaagcttcatgaataattaagtacatttagttaaaacatttttcatataagaacacattttaaatattaaggagattaattatgacaattattgttaccggtggagccggatttatcggaagtaactttatatttcacatgttaaacaaatacccagactacagaatcatctgtcttgactgcctcacatatgcaggtaatctttcaactcttgagcctgttatgtctaaccctaacttcagattcgttaaggaaagcatcacagaccgcgaagctgtttacaaacttttcgaagaagagcatccggatatggttgtaaacttcgctgctgaatcacacgttgaccgttctatcgagaacccggaagttttccttataactaatattcttggtacacaggttcttatggatgcctgcagaaagtacggtattcagagataccatcaggtatctactgatgaagtatacggcgatcttccacttgacagacctgaccttttcttcacagaagagacaccaatccatacatcaagcccatacagctcatcaaaggctggcgcagatttacttgttcttgcttaccacagaacttatggacttcctgttactatttcaagatgctctaataactatggaccataccacttcccagagaagcttatccctcttatgattgctaatgctcttaacgataagccacttccagtttatggcgaaggtcttaacgttcgtgactggctctatgttgaggatcactgcaaggctatcgaccttatcatccacaagggacgtgttggtgaagtatacaacgttggtggacacaacgagaagagaaatattgatatcgttaagcttatctgcaaggagcttggcaagcctgaatcacttatcgttcatgtaggtgacagaaagggacatgatatgcgttacgctatcgacccaactaagattcacaatgaattaggatggcttccagaaactaagtttgaagatggtatcaagaagacaattcagtggtatcttgataataaggaatggtgggagacaatcatttctggcgaatatcagaactactatgagaaaatgtatagcaaccgctaattaacacatttattctgtaaggagatttgacatgaagatattagttaccggcgttggcggtcagcttggccacgacgttatgaatgaactgataggcagaggtcatacaggcgttggcagcgacatcgcacctgaatattcaggagttgctgatggaagcgctgtcacaacagccgaatatgtacctatggatataactgatgctgcccaggtttctgaagttatcactaaggtttcacctgatgttgtaattcactgcgcagcatggacagccgttgacgctgctgaagatgatgataagaaagccaaggttaaggctatcaatgcagatggtactcagaatattgccaatgtctgcaaacagcttgactgcaagatggtatacatcagtactgattatgtatttgatggtcagggtgaaacaccttgggaaccagactgcaaggactacaagcctcttaatgtatatggagagactaagcttgccggagaacttgctgtttctaacactcttgataaatactttatcgtgcgtattgcatgggtatttggtgttaatggaaagaactttattaagactatgcttaatgtaggaaagactcatgacgaggttcgtgttgtcaacgaccagattggtacaccaacttacacattagatcttgcaagacttcttgttgatatggttgaaactgacaaatacggttattaccatgcaactaatgaaggtggatacatttcatggtatgactttactaaggaaatctatgcacaggcaggtctttctactaaggttacacctgtaactactgctgaatacggcatttctaaagctgcaagaccttttaacagccgtttagataagagcaaacttactgctaacggattcactccgcttccaacatggcaggatgctcttcacagattcttaaaggaaatcggtgagatttaatatttcaaaggagattttatcatgggacagattacaattgaaaagaatgtcgcaggtatcgaaggactttgtgtcatcactcctgctgttcacggcgataaccgtggatattttatggaaacatacagccagcgtgatatggaagaagctggtatcaatattaactttgttcaggacaaccagtctatgagtactaagggtgttcttcgtggtcttcacttccagaagcatttcccacagacaaagcttgtaagagctatcaagggagccgtttttgatgtagctgttgaccttcgtacagactctgaaacttatggaaagtggtacggaatccttctcacagaggagaataagaagcagttccttatccctaagggatttgcacatggattcctcgttcttactgatacagcagaattctgctacaagtgcgatgacttctatcatcctaacgacgagggtggtctcgcatggaatgacccggcaatcggtattgaatggccagagcttacaggtacttacaacggctcagcttcaggtgaaggctacgctttaagcgatggaacaaagcttaacttaagtgataaggaccagctttgggatacacttgagaacacatttaaattcaactaaataacacaggagattggtaaaacctactaatctcctgtttttttcttgtttagaatgccttttttgtcattgttaaacttaattaacaagattttacctaccactctacacttttctatcatttgtgtaggtcttttcccttcattattctttattatcacctctgatacccactaaaaagcccactcaatcactatcttttcaccatttagtatgttttttcttaagcagcaatacatttccttttaaaattgacctactacttcggaataattttggttttgtgtaggtcttttcgcagattttctcaaattaatgacattttatataaatgttgtttttagtattgattttctttcttttgtattatatattattaatatatttatataaggaggctgatatatgaataacatcaataacaatagattattaccacattgtcctttgacacccgatactgtgatttcaacaataattaacaggcagtcagaactttcttcacttcttgacactattaatacgagattagatgaggcaccagccggtactcttcgcattgctaacagaggcaacagacctcagtattatcacagattagattctaatgacaggaaaggctcttatattaaaaagaaaaaagaactgactcttataaagaatcttgcccagaaggagtatgatttaagagtcaaaaaagaggtggaatgcgagctgcaggccttaacggatttccttaagaattattctcctgagcagattgaacaggcttacgattcacttaacacggcaagacaggaactcatcatcccagcatatattgccaccaaagacgttatacttcaatggaatgacatccagtataattctttggatatttctgaagacacccctgaatactattctgataatggagaacaggttcgttccaagtctgaattgataatcgccaacaaactgaaacagcacaatattccatacaagtatgaatatcctcttgtactttctaccggcataactgttcatcctgatttcatctgccttaatgttaataccagacaagaattcatctgggaacattttggcataatgggagattctgaatacatgactaaagcattaaagaaaattaatgattatgccaaatctggctatgtattggggaagaatttcattgctacctttgagtcctcctctgttcctgttaattccaacatggttgatatcaatattaaagaatttctcttataagatacttttatgaaagatatcgcctatatctgattgctattcaattatctataacaagcactttgcatcttccattaacctttgttccataaaacctacacaatcactaattatgtgcaattgcgtaggtcgatttacagtatcagaatccctatatctaagaaaagacctacttaattgcttgtaacaagactttgagtaggtctttcctctccactttttatctgctgctatagaatcgacctacttttaccgaaaaaagacctactaacacaccatattggcaattgttagtaggtctcgtcccatatcttattcaattatttcctcaaaaagacccactcaatctacacaatcatcttagttagtaggcttttcgccaaaatcagttgcagtacatgtattcgctaaacccatccacgcaacttccgcaacttccgcaacttccgcaacttccgcaacttccgcaacttcaatgttccccaggatgatacgtaggaacaacttcttttataagttcacggatattaccagtttctgaataagcttcttccttaagcttctcaaggttatcaaagaaattctctttatcaaactcaattggttttccaatgtggataagcttgttatctgtctcctgaagaccttcttctttcataagaagctcttcgtagagcttttcgccaggacggagtcctgtgtatttaatttccatgttgacgccaagtgtataacctgacagtctgataaggttctttgcgagatcatcaatcttaacaggctcacccatatcaagaatgaatatctctccacctttggcatatgcacctgcctgaagaacaagtgaaaccgcctctggtatagtcatgaaatatcttataatattaggatctgtaaccgtaaccggtccaccagcctcaatctgtctcttaaaaagaggaatgactgagccgttacttccaagtacattaccgaatcttacagcaacgaaatctgtcttggatatctcgttatacgtctgaacaatcatttcacagatacgctttgttgctcccattacattagttggattaacagccttatctgtacttatcataacaaacttcttaaccccatacttatcagccatccttgcaacattccatgtaccgacaacattattcttaacagcctcatcaggactgacttccataagtggtacatgcttatgtgctgctgcatgatatacaatatctggcttatactgtgcaaatacgctttcaagtcttgaaacatttcttatcgaaccaataagagtaacaacattggcatcaggataattaatctttaattcctgctgaatatcataggcattattctcatatatatcaaatataatgagctgcttaggcttgtgacttacaagctggcggcacagctctgatccaatagaaccgccaccacctgttaccataatgaccttatccttaacataacccatgatagattcaatatctacttcaatcgggtctcttccaagaaggtcaagcacatcaacattacggatagagttaacattaatctctccatctaccatctgatatacacctggcagaatcttaagagtacaatcagtctctttacaaatgtttaatatatcccttttaacttcattagatgctgatggaattgcaaatataatctcatcaatatcataaagctttgctgcttccttaatcttgtcccttgttcctataaccttgacgcctcgtatgtatttaccaaccttgcggcggtcatcatcaataatacatgcaatattagagttggcaagatagctcgaattctgtatttctctcataatgacattagttgcctctccggcaccaataatcattacattgttggaagtcttaatatttctgtatttgttaagaacagttcttatcattctgtacataaaacgacttgcacatattgcaataataaggtatattgctgcattaaaataacagcttctaggaagcatattacccataatcttattacttaagaaatgcactacttctacaataatacacgcttcagcaattctgtacacctcagctatactcgcatactgccacagactgtgataaagtctgaacagccagaatataagcagagacattatcgtgtacggaagcacgttctctacataattactaatatactgaggttctatagatacaatacctacatcaaatctcataataagcgacagatatacgcatgcattcagtaaaaatgtatctgttaaaaacaagaaaaatcttcttaccagaagctgtattctgtcctttttagtctcacccatcatctgttcctcgtttctttagcaggctttttagcagctaacccacatactgtaccaattccataagaaatatgcaacaggaaaaataaaaatggcagtgcaaaacatgttttattgcgttccttcttagctcctattactgcaactaccgacataaccaccgccaacagccagtatgctccccacataagtcctgtaattccgtatacaatacgagaaaaaaacgacttcacagcaagcagcttacatgacacacttgcaactgttgtaacaataatagccatgacaaaagcccacggaacaaaatgatatacagaaaggcatcctggacataccttgcttgtctttccaatccagtatccattgccatatttctgcttaagcatcttaggaagtgaacttcttgtatgctggtatgatattatatccggacagaatcttaatttaaaccctgcttttctcatacggtaatgaatttcattatcctctgttcttgcaagagactcattataatgtccgattttttcaaaaacttcccttctatatgcagcatggaacagcgatttcatatatatcttttcttccgttccattcccgccattacggtaaggtgctatgcttgaaccaaacatagaactctcggcaagaagaagtgtatccttccatggtgtctcttcatcaactatattaggtcggacaccaccaacaaccatctcgccttcttctaaaactttaacattcttgctgacaaaatccaccgggatatgtgcatgcgcatcaactcttataacagcttcccctgtataattatcgagcagcacgttccatccacacggaagcgtcttcttaggattatcaagcacaactatctgtcttgctcccatcttattctcatcagcaaacttctgcataaccgccttcgttccatcagttgatgcagaatcaacaagcacaacttccataagattatgatcataatcctgcctgcttatgtcatcaagaatattctttatcgtattctcctcattatatgcaataacggcaattgtaataaacatactctacctacttcttaacagtcattctttcacttccaactactgatgtaaatgtatcccacaatacagccgcatcagctttcacgccaaaatgtttcatactttcaaggttataacgcatttttgccggtaatacttcattcagatatatattatctgtacttttttcatcaacagcctcaccaagaagcttgtcctcatccttataagcaatacttgtccttgatgtaagtcctgccggcaaaagaagtgtcgcatacatctccttagtgtacttcttaacatacttaggaacttccggtcttgttccgacaagagtcatatcacctgcaagtatattaaaaagctgaggaaactcgtccattctgtactttcgtaaaaatgctccaaccttagtgattcttgaatcattatctacagtcactgctgcccctagcttacttgcattgtcaaccatagtcctgaacttgtatatacgaaaaattcttccatactgtgttactctcgcctgcctgaaaaaaacaggtcccggtgaatcaagtctgattgcaagtgcaattattcccattggaataattaaaactgccagcataataccagcaacaataacatcaagcactcttttcatctctaaccacattctgtgtttcataagtatattatagtattttcttacttccttagttctcatttcatcaggaagaagctgccatggtcttaactccatcgtaatcaatcccctttttgttgttgtataactaatgtccgattatttcattctgttaaactgctctattacatattctacctgttcatcagtaagacatgtatgaagcggcagtgtaatctcattacgatacatattatatgaatgtggaaaatccttaatatcaaatcccatgttcttatatgccgtatgcattggaagcggcttaaaatgtacattagttgcaacacctgcctcagcaagtcttgtaatcagttcattacgctccttaacatcctttccaagaagccttacaagatacagatgaccacttgaagtatattcatctgtaaaatgcttcataatatccacatcatcggctgcaatcccttgtgtatatctctcaattatatctcttcttctcttaagaagtcccggatatctcttaagctgtacaagcccaatagaagccataatatcagtcatgttacatttgtaataagttcctttgatatcatattcccatgcaccaagcttagtctttgcaagcgcatccttagactgtccgtgaagtgagtaaagcattatctgcttatatatatcctcatcatcaactcccggaatacttctccatgtaagagctccgccttctgctgttgtaaggttcttgactgcatgaaatgaaaagcttgtaaagtcagccttcattccactcataacaccaccctcacttgctccgaaaccatgtgcagaatcagcaacaattgcaactctgccaagtgcctcctgaaggggtgttgaagccttaaatatattctttttactctcgacaatctttcttatcctgtcatagtcaaccataacaccacctatatctacaggtattacagccttggtactctcattaattgcagcttcaagcgcgtcataatcaaggtgatatgtgtccttttcaacatcaataagaacaagctttgcattaacatgcgcaacgacacttgcagatgctgtataagtgtatgcaggaacaataacctcatcgccctcaccgattcctaacagacggagtgctgtctctaaacatgctgtagctgaattgagacatgccgccctgttacagcctacaaactgagcaatatttctttcaaactctttagttcttggacctgttgtaatccatcctgaccttaaagcctcagaaactgcctgaatctcttcctcggttatatctggtggtgaaaatgaaatattcataactcttatctccttttcgtactctactttgtagatgactttgttgttgcaggagtgaccgttggaacctgtacctgtgttgtagtctcctgggtacctccacttatcatttctggaaatgcatatgtcagatctcctgctgtattagcaattgatattgtataactaactgtattatatccattctgcgaaagtgtaatcgtcttctttccagatgatttgttaaatgaacacggaacagttcctatgtattcactattgacataaagaaccgctcccttaggtgctgttactgataccttatatccacttgtattatctgccgctgtacttgctgatgtacctgatgaagtcatgtcgataaccttcgtaacataggctgaattaacatttataatctcagaatattcctgatagtggttggctaccagcttaactctgtgagttccataagaaagtgaaactggggaagaataatcaacctcaacaccatcaatgctcataaccgcacccttcggagtaactgaaaaattaacagcccccatcttaaccggatcactttgtacttcagaaaaatcaactgatgtagtctcatctttaactatagtcactgtcttacttgctgacaggttaccattacgtacattaaccgtatatgttccaacaggtgcagtcaccagcatatcctttgtaacacccagtaattgtttattacctatgcttacataaccaccaataagtgcatctacgcctgtaagtttaagatatccgtgtcctgcagttacattcaccgaatatactttctctccaacgcccctgataaccagcttatcctggtcaacgagctgtgcaatacttatacgttcttctcctgaaagcacaactgtgtaactttcatatatcatattggaagccccaatgcttaacttccttgaattctcatctacggttattcctgaaacatcatatcttacccaggcatcactgtttccgtgtatcttcaccgccttgcccttcttatccacatatacatcatatattccacccatatccatggtagaagctgcttttatctttccgtaagcatcctgaatatctgtactgcctgtataagggacttcatattctgttcccgtctttatatctacaaaccgcattctgcccgtgtcagcatctctcaatgtaagaactcctgtaagtgtaggattctctccatcacccttaatctcctttgcggcacctggtgcaggggtaatactgcttcctggtatcaccgccctgtcattatttctggaaaatgtgcatgctgtctgacttacaattaacaccataagcatacacactgcaattattcttttcataagcattcctcgcaaatacttttacccttgtatcatcagattttatcacataccacacattttatcaattaattctcttctgcgcatattctgttcaataacaatctttaatttatctatattcttagcaggaacccacgcctttcctgcgttatagtactgatttatgatcttccagaatttttctggaaagctcaataatgtcacaagcatgtcaatatcatcatcttcaagcggctttaatctgtcatattcatcaaccagtctgtatgccacattaatattccagtcatgcttttccataacctttcttaaaaactggtaaagatctgcaacctgacagtcattatgacatttttcaaaattagtcactgcattgccgccattaccaacatcaagaaacacattatgataattatagcttccatgcacaagctcattagtctgttccatcctgtcaaagcgctcatcaaaacgttttgaattaatattcctgctcgcttcatccgcttccctgaaaaatgtatcaaccgcaccaagcgcaatctgttcaaattcatttttctttttcttgccacgcatataattagctgcctttttaatttcttttgtatgtctttccatattggtgcgtaaccctgctcccctgtcaaaatgtacagcattatgtacgatgctttcactggcctttaattctgactcgggctgctcatctgcggtctctgcaagcgccatacattcccattgctttgtaatatttgtatttacattattccttaaatatcttacaccattagatgaaacaacatttagacaaatatgaagtcttgccagagtccttaccgcctccatcacgtcattcacagacttgacatcacattccctgcctccaaaccagttcttcattacatatctgtgcccatcatctccaacagtaaaaagctctccatcctgatttctcacatatgtatccacattttcaaagcctgcatcactaactgcttttgtcactgcctcatctctcagataaaacccatcatttcttgaacactcgagaaaaagtctgcatcctctgtctgtaaaaagaattactcctccacgaccttttaccattttattaacctgaatatcataaaatctaatacattccaatgatttatcgttcatataatcccccatttccgcacttaatacagacgccctttgctcatacgcctgcgtctgccttatcttatgacatttatggctgctatattccttggatttactgatacgacgaattaagaaaatcataatcttgatgaaaatgtaattttttcttataatagatagatgtgagcttttttcacatttataataaatattattatagggggaaatcatgcctgaaaactttcatattgacatgccggaagctgtcaggaacattatacatacaattgaagaacacggcttcaaagcatatgccgttggcggatgcataagagacagtatccttggacgaaacccagatgactgggatataaccacttctgctgttccatcacagataaaaactttctttaaaagaactgttgataccggaatcgcccacggaaccgtcactataatgatagataaaaccggatacgaagttacaacctacagaattgatggcgaatacgaggatggcaggcacccgaagtctgtagaattttcagacaggcttgttgatgacctgtgccgccgtgattttacgataaatgccatggcatacaacgacagtgatggatttgttgatgaatttaacggtcttgatgatttggatgcaaaaataatacgatgtgttggtgaaccagaattaagatttacagaggacgcactgcggatgatgcgtgccataagattttctgcacagctcggctttaccattgatgaagcaacatggagtgcaattaaaaagcttgccccatcaatcagtaaaataagcatggagcgtgtgcatgtagagcttggcaaaacgcttatgtctgcacatcctgactatgttgcagaatattcagaagcaggactttttgagccgattcttccagtagttgataatgcattaaagagccgttacaacaagaaaattcttgccatactccgacatgtaccagataatatatatcttcgctatgctgcacttttcataacttctacacctgatgaagcagctaagactctccgtgctcttaaacttgataacaagacagttgacacagtatctaagcttgttgaattatcaaagatagatatagaagaaactgagccggccgttcgtactgcccttaataagtacggcagagatttcctgcctttgtggcatgagcttatgatggctgtacttcaggcatctgaagacatcataggaataagcaatccggcaaaggtaaagcatcttctgacattaaagcgtcttgcaacagatattcttgcacgcggtgactgctttacaataaaagacctcgacatatcaggcaatgacctcattgaatatggtcttcagggacacgaaatcggtgaaacactgaaatccctgcttgatatcgttatagagaaccctaagctcaatgataaagctacactgattgccatgattgaacatattaaataatacaatcaaacaataaccctcaccggctgccttctggcaaatccgatgagggttattataattaacacttcttaaattaatatgccttaccccagtaaaccatagccttagccggcttaccacagcatacacacacatcacttaacttctcctgtgcaaatggcatacatcttgatgtacatgtagtatcttccttaatcttgtcctcacaagcctggtctccacaccacatagccttgatgaatccagccttattagctgctgtatccttgaattcatcataattaagagctgtatatgtatgagcttctctgtgagctcttgctctctcaagcatatccttctggatagtatcaagaatttctggaattctgtctgcaagctcatcgatatatacagtaatcttctctcttgtatcacgacgaacaataacagcctgattagcctcgatatctcttggtcccatctcaactcttacagggataccacgcatctcctgctcagagaacttccagccaggattcttatctgaatcatcaaccttaacacgaagtcctgctgccttaagagcctgtccaacttcataagccttgtcaagaacgcctgccttcttctgcataataggaataacatcaacctgaacaggtgcaaccttaggtggaagcacaagtcctgaatcatcaccgtgagtcataataacagcaccaataagtcttgttgttgttccccatgaagtctggtgaacatattttaacttattatccttgtctgtgtactggatgccaaatgctctggcaaatccatcaccaaagttatggcttgtacctgactggagtgccttgccatcatgcataagcgcctcgatagtataagtagcctctgctcctgcaaacttctccttatcagtcttacgtcccttaattacaggaattgcaagaacttcctcacagaagtcagcgtaaaggttaagcatctgctgtgtacgtgcctcagcctcttctgctgtagcatgtgctgtatggccttcctgccataagaactctcttgaacgaaggaaaggtcttgtctccttctcccatcttacaactgaacaccactggttatatacctttggtaaatctctgtatgactgtatctcatctttatagaaatcacagaaaagtgtctctgatgtaggtcttacacacattctttcctgaagtggattaagtccgccataagttacccatgcaacttctggtgcaaatccttctacatgatccttctcaacctcaagaaggctctctggaatgaacattggaagataaacattctcaacacctgtttccttgaatcttctgtccatctcattcttaatattctcccagattgcatatccggccggcttaaaaatcatgcatcccttgacgcttgagtaagacataagctctgccttcttacacacatctgtgtaccactgagcgaaatcctctttcatggatgtaatcgcttctactaatttcttatcttctgccataataaacctctttctatgacattacagacccgtttcatacggagcctgatgcgaatgctgcttcgcattgtccgcctgccattgacggcaccactagagtttatcatgttctaaaatgcttttcaagtaaagaacaagtgcttttattatacaatatgatattggtccaagaataaatccgacaacaccatacacaagtatcccgatatatatgaccgcaagcattgtaaatggcgcaattcccattctgtcacccatacattttgactccataatctccctcacaaaatatgtgacaatatacaacaccacaagaatcaccgcatttttcacatgtccgaaaagcaggcttcccacagcccatggtatcagtaccgttcccgtaccaaatatcggaagtgcgtcaataatcccagtcagcacaccaagaagaatcgcatatggattgcctatcattaaaaatgctgttgaacacaccacaatatttatcgacattataataagctgcaccctgaaatatacatttatcaaagtccgaagtcccacatgcaccgccccgacttcgtccttaaatatagtgttctcccgccagcttctgtacttctcaattccagccgccgcatatatcgttccaataaagcacaccacaagtccggcaaccgccataacgcaccatgttataaccgggacagaatgttttctcataattgtaaagaacatctgctgcccatcaccatctataattatccctttacatttttcaaaaaatgcgtaactgcagccttctttcaacttaatccagccatcaatacggcagcatacaagcttaaactgcccatcaaggctgttaatgttctcatcaaaattggctatgaaatctttaagttcgcgaaacgccatataaccgacatacaacagcactgaaagaattataagcgtcaccattgttacaactatactcgcagcaagagtctttttctcccttaaaagtttcgccagccctactatcggcttctgaagcagcaccgcaaaacaaaatgcaagcaagaaaggccacacataatagaaaagtactttaaatataaagaaaaccaccgcaataataacgacactgccaacaagcaatgtcagccgcttcctgaaatcccacacattttcacccatatgccacctcacacctgctaataattatcgtttaattagtgtgtgcgtggctgggacatttattcgcccaatgctattgattaattatcaaaacgcatgtattcttaataaaaacataaaaaggatacaaccatgcttaatataatacacgaaactaaagacattattatagtgaataaaccagccggacagctatcccagggtgcgaaaggatttgatttagaccttgtaagcgaagttatgacttacaacgcttcacagggaaagcctgcatatgcagcaataatcaaccgccttgaccggccggtttcgggacttgtgcttattgcaaagaataagtctgcagcagcaaagtattccacactaatgcagaaggaaggcggatttaataaacaatatgaagctttaatatgtggaaaactatccgaaccaaaaggaacttttgttgattatttaaagaaagatggaagaacgaacacatcagccatagttccggcagacgacgccgctaatgatgataaagaagcaaagctttcaaagcttgaatatgaagtgatatcttatgatgaagttaaagacattacacatgtaagaatacatctgattaccggcagacatcaccagataagagttcagtttgcaagccgcaggaacccacttgttggagattataaatatgccactgctgattgcggcatggataacgccattaaagcagtggcacttaaaagaaatcagattgcactttgtgctgtttcgcttactattgataataagacatactctgttacgccggattttgcgcaaaaatgatgagcttaagtgatgtatctggctggattattgagttgatatgtcgtgcacaatttcaaagacctacgaaatcacagttttgtgtgcatttcgtaggcttttttcacatcattcaacttttttgcgttacgaatcacctactcaatccagttctcttggctatttagtaggctttttcgctcacgtcacagtcagatacatacatttatcgacaaaaaagacctacgaaaagagcttatacatctcttttcgtaggtctatgccatatcatccagcagaataaacttctaaaaagcctactaaaactagatttattggtagattagtaggcttttggttaattaaatccgtcgcttcaccagcataccaagcatgcggttagtcaattacatcttaaagcggtaaccaactccccatatagtctcaatatactgaggcttgcttgtatcaagctcaatcttctctctgattttcttgatgtggacagttacagttgcgatgtcaccgattgaatccatatcccagatttccttgaaaagttcttccttagtgaagacatggttaggattctctgcaaggaacgtaagaaggtcgaattccttcgttgtaaatggcttctcctcaccattaacaaatactcttcttgctgtcttatcaatctttattcctctgatttcaataatattgttattgttcttagaattacttacaagtctgtcatatcttgcaagatgtgcctttactcttgcaacaagctcactagggctgaatggcttggtcatgtaatcatccgcaccaactccaagtcctcttatcttatcaatatcttccttcttggcagacaccatgataataggaatatccttaacttctcttacctgcttgcatatctcgaaaccatcagttccgggaagcatgatatcaaggatacacatatcaatatcctcatgcagtgcagccgctaggccacttgttccatcattacatacctcaacctcatatccgttaagttcaaggtaatccttctcaatatctgcaatactctcttcatcttctacaattaatatcttgctcatagccagtcccctttcgtgtagtttcattatgcattctcaggattctcttcatcctttgctttaagcagattaagatgcatggtcgtgccttcgccctctacactctctgcccatatttttcctttgtggtcctcaacaatcttcttaacaattgcaaggcctataccacttccaccatgcttgctgtttcttgattcatcagttctatagaaacgctcaaatattctctcaacatctttagctgcaatgccaataccgttatctgagaatattgcatgaatgtagtcgccttcatcgtacaggtcaatcttaatctttccctgtcgtccctcagccatatacttaaccgagttacttataatattattaacaaccctctttagctgctccggatcaacattcatatatgccggctcagtaagatggtcattatattccagttcaatctggcttgcctcaagctcagtgcctatctcttcacaacagtctccaaaatagtcacttacattacatctgacaaatgtatatggaaccctgttagtatcaagccttgaatatatagtaagctcatcaatcagcttgtccatatcattaaccttgttagcaatagtctggatatacttagcctgcttttcaggcgtgttggcaattccgtcacgcaagccttccacatatcctttaatagccgtaagcggtgtctttaagtcatgtgaaatatttctgataagctccttttcctcggcatcagacttaatcttatcctccgcactctgcttaagtacgactctcatctcctcaaaatcccggcatacatctccgatttcattattagatacctttggcatctcgaaatccatattgccttctttaatattatcagttgcaagcttcagcttattaagtggcttaacaatagaactgtatatccacagagtaagtccaagacttgtaataattaacaccataattataacaaatataacctgcattataaatgtcttaacctgtggaagaatctgtttcaatgaagtaacaattgacacgctgtaaaaattatcttctgaatccttaaaattaagctgttttataagactctggtactctccacccttgtaagttccaacatcagaaacattctcttcatcagcagaataatcaggaagaatctttacaatttcgctgtctggtgcttctgttgaattatatataataattccattccttcttacaacaagacaggacatcttagatgacagctctcctgataattcatcaagatattccttattagtaaactgctccggcgaagtatcaacctccgtcttcatatccttatatatgctgtcagtaatctttccaaaaagtattataggtgaatatacgccaacgagaattgccccatcatctacattatatgttctctcaatgctttccttctgtacacaatacagacctcccagagcaagaccactcagcagcacaggaagtataaccataatacagaaagaaatatacaacttattctttagcttcataattaaccccttttcctctcaatactaccatatacagggatatttgtaacattacaaatgtattaattttattaaatataaattaaaacagctgtaacggaatatccgctacagcctgcaattaacctatcttgagcctgaacttctgaagttctctctcagaatcaactcgtttaataattccaccaaggttagtaatctttccttcaaaatcctcataacctctctggatatactcaatatcatcaatctctgatataccatctgctgcgagcgcagcaataacaagtgccgcaccagctcttaaatccggagcattaagctgcacaccacaaaaacttttaacaccttcaatataggctgtgttaccctcaaccttaatcttggcacccattcttccaagctcatctacatatttgaatctgttctcaaatatgctctcagttaccatacttgaaccttcagcaagtgcaagtacaactgaaatctgtggctgcatatccgttggaaatccaggatatggcaaagtcttaacattagtactcctaagtgtacagccctctgctataactcttaagctgtcatcaccttcctcaatcctgcatcccatctcaattaactttgcagatattgattccatatgcttaggaataatatcctgaataacaacatcaccatgtgtagctgctgctgccatcataaatgttccggcctcaatctgatccggaataatagaataagtacatccgtgaagtctcttaacacctttgatacggattacatcagttcctgcacctttaatgttagcacccatagaattaagaaaattcgctacatcaactatatgcggttccttagccgcattttccagaatagtgtctccctctgccatacatgaagccatcataagattaattgttgcaccaactgttacaacatcaaaataaacatgagctcctgtaagcttctctgcctttgcatgtacaactccacaatctatatcaacatccgcaccaagtgccttaaagcccttgatatgctggtcaattggacggcttccgatattgcatcctcctgggagtgcaacatgagcctcattgtacttaccaagtaaagcacctaacagatagtaagatgctcttatttttcttatataatcatattctacattggtatcacagattgaaccaccatttatctgaacggaattgttataaacatacttaaccttagcaccaattccttctatagcctgaagtaaaactcttgtgtctctaacattaggtacattttcaattgttacagtatcatctgtcataattgctgccgcaagaatacctaaagccgcattctttgcaccaccaatggaaacttttcctctgagtggcactccacccttgacaacatattgttccatatagcacctctaaacataatagtcacatcttataaagtatatcacagaacttcgatttgtaaagattttccctgaaaatacatttataaaaatatggcaatttcacccttattttattatatgcatttaaaatacatttatttacataataaaggctgtccttaacagggcagcctattcaatacttattaattcttattaacgtaattgagcggattcactacagttcctccaacccatatttcaaaatgaagatgtgggcctgtactatagcctgtattacctgatgctgcaatagcctgtccctgagaaacactctgaccaacgcttactttcactgaacttaagtgaccatatcttgtcatagtgccattactatgtgtaatatcaacacaatatccgtaatcgccataccatccggctctggtaaccgttcctgcagcggcggctgtaactgttgtaccctgcgtaacataccagtcaacacccttgtggaaacttccccatctgtaaccaaattcggatgataaggttcctcctgatattggtcttaaatatgttggaggtgttagcgttccgactgcaatagtcttcggaacggattctttaataatagtctccttaacatatgttctgcctgtttcgttaccattagtgtaggtaacttctgctataacagatctgtgaccaacggttccttcagaaataactgtattagttcctctgtaattagtgttgtcatcctcataatcaggctctgcttcataatcttcttcataagtcatctgataagttgtaagaacagatatctctgatttaggaactgtaacaacaattgaatcacccggtgcaattacactgtcctctgtaagattagaattaagctcaagaagctgtgacattgtaagtccattattctgtgcaattaccgataatgtatcaccagcctcaactgtatatactgtcttttcttcgtgttctttagtaatgctctcataagcgtcatttactgatgttacagttgcattatccgtaggaacttccacaacaactacgtcaacatcaaatccaattccagtaagaccatctccattaaccactgtctctccgtcttgcgaaatcgctgtaccactaattgctgaggatacaatctctgctgctgtagtttctgtggccttttcatttacacttattccataagtacctgtcgctgcatcaactgtatcaagtgatactgtaaaagcattgttgggatcatatttggcaataagcttctcaaataaagaaacaactgcatccttcgattccaatgttacaacgaaatcaccaagtcttactgtataattcatatggaaatcaacatccataacattatcaaacatgtaactgtatattgcaccagacagctcgtccacactcattctctgtgcaactgttttattctctttggcaatctctatatcaggatccatatacacaatttcttcatactgtgcactaagttcctgccttgctgatgccagtgcaacaataacttcctgttctgtgttagctgctccgacctttattccgttaattgtaatactgtaataattagcttccgtttttaataatttctttgataaaaatggaatagcaacaatacatacaaaacaagcaaccgtcattgtcttaatgagtgttattctcattcgtctgccatatcttgacaagcgttccataatgtcctccaaatattatattaatatatagtcatcttcttgtaatatctttgtaacaatttcgtaacatttatactaacatatgatatttggtttgtaaaccctattttttctttctggaagattttgtcttagacggcttctgcacagaatatccgaacttacctatgaaatcaccaagtccataatatcttccatgcgaatatgcgataaggtctgcgtctgacaaatgcagtgttcccttctcgtctaacaggctttcagctacatttacagccataacctctgctataaacatatcgtggcttccaagctctaacacctgctttaccttacattcgatattgacaggactttctgcaattgccggagcttcaatcttaactgagggtactgctgtaagatgcatatctgcaaatttgtcaacgtccctgccagattttactccacaataatctgtggctcttgcaagctttcttgttgtaagattaataacgaattctcccgtttccttaataatgtcatggctgtagcgttcttttcttacagatattgaaaccatcgccggatcagagcatacagttcctgcccatgcaaccgtaataatattaggcttctctccttttcttgcacagcttaccataacagcaggcacaggatagagcatattgccagccctccatgtctgcttcttagctttctcgttcttctttatcttctcgctcatgcgttaagtgcctccttaacatgatggtatccttccagtataatagccgcatggtctgctgccagcccatcgccgtcaacaaccttatatgtgcggttcttaagaataccttttctataggtaacttctacccttgcacagatattaatattcttatcagcatttgacagcctgcacagccattcttctttgacaagcgacttatcctctgtcgtattaatgagttcatctgatatatcaaaccatccggcttctcttgcatcatcacctgcctgtgccttctggctgccttcatctatcaatgcaacaaatgctgttgtaataatccttgttcttgggtcacggtcataatcgccatatgatttaagctgttctgcttcaatatcatgcataccggtttcctcctgaagctctcttaaagccgcatcgtagagattctctctaaactcaacaaagcctcccggacacgcccacaatccaatacacggatgatttcctctctttataagcagaatcctcttaacctgtgaatcttcctttgtaaatacaagcgtatccaccgtgttgcatgggttctgatatttatcagggtcgtatttgtcaaggaaaacggccagactatcaccagctttattaagttctccggttcccacaaagcatttattctgctcttcacttaaatatttcatcgtttctctcccttacctgcaccaaaccatttaattcttgtatcctttgctccacagaacttcctgtgtatgaaatcatccagcacctcattaaagctgcagaatttatctacaagtacaataacaaatgtttctttatatttaggtggtgtaactgtcaatggaaacatatgctttgcaatcatgtctccctctttttctgttatgttgaaatatttccctgcattcttaagtgcctttgtaggatgctcaaaaccatgaagtctctcacccttctcaggtgaatacttgtgccagtcgtacagaaacaggtcatgtaaaagtcctgccttagctcctgccttctcatcaagatgtaatttcttgcacacaagataattataataagaaacatgtacgctgtgtccgaagaggcttgtacgtccatgatgcgaatatttcttcatactctgtatcacatcatctgaaaacagcttattcatcctgttcttatattccctgccagactcattctgcttaatgtgtcctaacttatatctattacatattctgtcaattgcattagaatattcatccttcttgattctctccttgtatactggtctaatgcttcttcctttgtaagaattaatcttaactgacatattaatctccattcctgcccataaacataatctcgtacatgcggcattaaaatcaccttgaaaattatatcataaaagcctgtacatttgcataaatataattattaatatattcaacatttaagttgtatgattatagaaattgtgctaaactatgcacataatcacttgcatttttatgcagaaatatgattcggaggagaatataatatggatggtaatgttatagttggacagtcaggaggacctacttctgttatcaactcaagtcttgctggggtatataagacagccatagacagaggagctaagaaagtttatggtatgctccacggtattaagggacttcttgatggtcagtatgttgacctttcagagaagattaactctacaatggatatcgatttattaaagagaacaccttcatcttatcttggttcatgcaggtacaagctccctgagataagcgaagacagagaaacatttgataaaattttcaagattctcgatgatcttgatatcaaatatttcttctatattggtggtaacgactcaatggatactatcaagaagttatctgattacgcaatcgttaccggaagcgatattaaattcatgggtgtacctaagactattgataatgacttagctgttacagaccacacaccaggatttggttctgctgccaagtttatcgcagctactatgaaggaaatcatcagagatggtcttgtatatgattatcctacagttactattgtagagattatgggacgtaatgccggatggcttacagccgctgctgctcttgcaaagagtgatgactgcgaaggtgtagaccttatctaccttccagagaaagtatttgatatcgaccatttcatggcaagagttaaagaaattgcagctaagggccgttcaatggttatcgctgtttcagaaggtattaaggttgctgacggaagatatgtattcgagctttcagagcatgtagagttcgtagatgcatttggtcacaagcagcttgctggttcagctaaattccttgctaacaagattggtgctgaacttggcatcaagactcgtgctatcgagctttcaacacttcagcgttgtgcagctcatatgacaagccgtacagatatcacagaagcatacaacgttggtggtgctgctgttaaggctgcatttgaaggcgagacaggtaaggttgttgttcttaagagagtttctgatgatccatatatgtgcatcacagagactaatgatgttcaccagattgctaacatcgagaagaaagttcctcttgagtggattacagatgatgacttcgtaacagacgacctcatccactacatcagaccacttatccaggctgagctttcaccaatcatggtagacggtcttccaagacatcttaatattaattcataataatattattacataacaaaaagcaggtagggaatttcctaacctgcttctttgtttctgtctctacgctgatatgctcttaccagtatacaactgataatatctgcccttctcttccatgagctggtcgtgtgttccacgctcgataattcttccctgttccataaccataatacagtctgcattgcggactgtagaaagtctgtgtgcaataacaaatgatgttcttcctgacataagcgcatccatacccttctggacaagtcgctctgttcttgtatcaatagatgaagtagcttcatcaagaataagtacaggagggtctgctacagctgctcttgcaattgcaagaagctgtctctgtccctggcttaaattagcacctccgccatgaagtacagtgttatagccatcaggaagtctctttatgaatccatccgcattagcaagtcttgctgctgcaatacattcctcatcactcgcctcaagccttccgtatctgatattatccatgattgtacccgtaaataggttagtatcctgaagaacgataccaaggcttcgtcttaaatcatttttcttaatattgttgatgttaattccatcatatctgatcttaccatcctgaatatcatagaacctgttgataagattagtaattgtagtttttcctgctccggtacttccgacaaatgcaatcttctgtcccggtgtagcatacattttaatatcgtgaagtaccattttgtccggattatagccaaagtcaactctgtcaaatgttacatcaccagcaagtcttgtgtactctgcactgttaccatcctttgcaggcttcttccaagcccacatctcagtattttcctctgtctcgataagctcattgttcttgttgtatcttacatttacaagctcaacgaaaccttcgtcaacctccggcttctcgtcacataattcaaatactcttccggcaccagccatcgccatgacgatactgctcacctgctggcttatctgggttacaggctgtgtgaagctcttgttaagacttaagaaagcaacaagtgtaccaatagtaagtcctgaaaaatcactcagagcaagaataccaccaactattgcacataaaacatagctgatattacctatattaccattaacaggcattgtgatattagcaaccttgttagcgttattggcactctcacgaagcctgttgttaatctccttaaactgctcaatactcttatcctcgtggcagaacaccttgacaaccttctgtccttccatcatttcctcgatataagcattaaccttaccgatatccttctgctgctcaacgaaatattttccggaaagtgcactcagcttagaagttacataaagcatgataacaaccattacaaccgacacgattgtaagcggaatatcgagtacaatcatacttacaaatgtagatacaagtgtaatgcatgaattgataacctgaggaatactctggcttataagctgtcttaatgtgtcgatatcgttagtatatactgacatgatatcgccgtgtgcatgagtatcgaaatatttaataggaagagattccatgttagtaaacagctctaatctcaacttctttaaagttccctgaccaacatttaccataattctgttgtagccatatgaacataatacgccgaccataagaaccgcagcaagcttgataagtgcgcctgcaagcggtgcataatcatgtactgctgactgtgtcagcggaataatataactgtcaataagcttctggataaacaatgttgctgtcagtgttgtaagcgctgaaacaagaatgcacacaagcactgctatacacgaaaacctgtaattctttaaaatatatccaagcagcctcttcataagaggaagcggattttctttattcttcttattcttcatatcagtattcttatccatatgctgcctcctattctcctgcctcgtcaaaatcaccgccgccctgtgtctggacctcgtagatttcgcggtaaaccttattgttctcaacaagattttcatgagtatcaaaaccactcacacagccattctcaagcaccaatattctgtctgcgtcctgaatacttgaaattctctgtgatacgataatcttggtagttcctggtatctttgttgcaaatgctttcttaatcttagcgtctgtggctgtatcaacagcacttgttgaatcatcaagaataagaaccttcgggtgcttaagcagcgctcttgcgatacagagtctctgtctctgaccaccggaaacattgcttccaccctgctcaatccatgtattgtatttatcaggcattctctcaatgaattcatctgcacaggcctgacggcatgcctcaatgcaatcctcctcagacgcattttcatcgccccatctcaaattatcaagaatagttcctgagaaaagcacatttttctgaagaacaactgaaacctcattacgaagagtttcgaggtcgtagtctcttacatcaattccgcctacgcatacagaaccatccttaacatcatacagacggcttatcagattaacgaagcttgactttccgcaacccgttccgcctataataccgattgtttcgcccgcatttatatggatatctatgtcttcaagggcatccttgtcgctgtctttcttgtatgtaaagttcacatggttgaaatcgattcttccatcaggtacttccctaaccggattctctggattagtaatatcagccttctcattaagaacctcagcaattcgtcttgcactcgctgcactcattgataccataacaaatatcatagaaagcatcataagtgccatcatcatgctcattacatagctgaacattgatgtcagattacccgttgtcatagttccatctgtaataaaatgtgccgcaaaccacgaaagcgcaataatacttccatatataacaaacatcataataggattgttgaatgcaagccatgattccgcctttacaaatgtcttataaagattctcggcagccttactgaatttcttattctcatggtcttctcttacaaatgctttgacaactcttattcctgtgacattctcctggacacttgcatttaaatcatcatatttggcaaaaccttctgtgaatattggagtcaccttatatataataaagaaaagtacaaacccaagaaaaataagcgcacctaagaatataagacttaatgtaggattgataataaaacacataaccatactgcatatcatcataaggggtgctcttactgcaattcttaaaatcatctgatatgcattctgcacatttgtaacatcagtagtcatacgtgtaataagaccagctgtgctgtatttgtctatattagagaatgcgaagttctggatattcgaatagattccctctcttaagttacatgcaagaccggtagaggccaaagccgcatattttcctgcctgaattccagcaaacagacttataaatgcaagcacaagcataagtccgccatacattaacaccttgctcatgtctcccgcctgaatacccttatcgataatacttgccgtaacaaacggaataagtatctccataagaacttcaacaattatatatattggcgtctttatcgagactcttttatactcaccaatatatgccgataaagtttttaacatttcttacacttcctttcgcagttattcacatcatcatatactttttgtaacagacggtgtaattcttctttttcatcagcagaaagcgatgaaagaaaccatttttctttgtcatgcattgccttgcctgcatgaacgcacatggctctgcccttgtctgttattctcacatgcttgactctcttatctgaagggtcatagaagctttctatcatccccttcttttcaagccttgctgctgttcccgctattgtcgcctgggctacgccaaagtgcttctctagctccttaagcgtaatacattcatctttagtttcattaattatcataagcatcttaacctgtgaagatgtcatgtcatctgctcttaactcctcattggcacatcttccaagaatatcattaagacgctttataagttctccacaatggagtgactctcgctgcatatctgctcccttcgtaacaaaacgacatacgaacctgccattcttttaataaaaatcttaagtcgctttgctatattacaaaaatgacagcacgctgtcaatagcatgctgtcatttttatttttatttaatatttaatcttatctgtaataagcaggcttcagatgaaccggaacaccatctgagtattcagcaatattagttccctgaataagtggccttacatacttaatatactcatcagaaatatctgttccctctgcggttatccactctgctgggaacttcttttccttgttgcatatatcgttcacatctgcaagtccgtaattaatctcatatccgttagtatcatctctttcaaatgtaatcatttttccagtttcaccgtcaagagctgctacaaccgctgcctttcctgctttttcagcttcatcaatatctgttgctgaagcaagaagtgatgaacatctctgtggaagattaagttcaatacttctacatttgattccaaattctgctttaacatagttctcaagatactttccacagcctgtaagcatcttatgtccaaagccatcaaccgatgccgcatctgcatattcacatatgaatctgccgtctttgtccgcaattccttctgatacgcacacaacaactgcagtttcctgttcaagtgccatcttaagtgacttcttgaattcttccatatcaaatgcatgctctggcatatatataagataaggatttctgctatactctgttcttgcaagtactgatgccgctgtaacccagcctgcatgccttcccataagctcaacaattgtcacagacgggtgtgcataacatgttgcatcaagtataatttctcttaatgttgaagcaacatattttgcagttgagccataccctggcgtatgatctgtcataacaagatcattatcaattgtcttaggtacacctataaatctgatgtccgattttttcaataatgccactcttgataattttgaaactgtatccattgaatcattgccaccaatatagaacacatatccaatgttcatctgtgcaaatgtatcaaacaatttatcatacaccttatcccctaaatcttctggaagcatatacctgcagcttccaagaaaagaagccggtgttatctttaatctatcaatcggctcattatctgccacttcagaaagattaataaaattgcctgccagaaatccctcaattccatgcaccatgccatacacagtgccaatcttttccttatttctaagtccttcctcaatcactccatataatgatgaattaataaccgctgtcggtccgcctgactgacctaccagaatattctttaacatactcatgcctcctataccttattgctgttgctgttgccgttgctgttgccgttgctgttgctgttgctgttgctgttgctgttgctgttgctgttgctgttgctgttgctgttgctgttgctgttgctgttgct

SEQ ID NO: 8506 - DNA, 43222 bp, Unknown
  gut microbiota DNA sequence
tagattgtatcatctgttgattattgattgcaacatgatacctatagatagtcgtatttttaattctcttataggaacatttcagccattttctatcatttaagctgtctacacagcaaaatgttcctataaattctgtttttgaagtcatcttataggtctttttctgcattttcacaacatttttttcaaaatacacctatttttctcaaattctacctataaagttaacttatttttaaattttataggaaacggcggctaaatcggcagacagaagataaaactcatataataataatgttccttaacaagttgacacaattccactaagcgtataatattcagttattcacacatttaaggagtttaatatgagattcgtaatacagcgtgttaatcatgcaaatgttaagatagatggcaaagttgttggaaatatcggacatggtcttttgattcttttcggggctggtcaggacgatacagaagaaatgcttccaaaatatgtagacaagatatgcaaaatgcgtatttttgaagacgagaatggcaaaactaatctgtctctggcagatgtcggtggcgagctgcttattgtaagccagtttacactttatgcggactgccgcaaaggcaaccgcccaagctttactaatgccggcgcgcctgatatggctaacgccctttatgaaaaatttgtggcaatgtgccgtgaacgtgtccctaaagttgaaaccggcagattcggtgctgatatgaaggtcagccttgaaaacgacggaccattcacaatattgatagatagtgaggatttctgatatgtttagaatgtggtgtaagctctttgacgacagagggcatcttatcaaagacactgtaattaaaaatgcggattctgatttaaacagaacccgcaaaatatttgctgctattcatgacgcatgttatgaattcgaccttgccgaaccaatctggcttgattccaatgtttcagaattccagcgccactcgaaagtgcgcttcactaaagataactttgttgaagatatcgaatttgcttatatggaaattgaggttattgaggaagattagaacaggagggcttataactgccctcccactctatttggtcttaactctgaccttctttcctgaaaatgcaattccaaatttcaggatatcattaattccttcctgcttcatctcagaatcatatctcatattatcaatctgagtcagtgcctcgtctgcaaatgtatcaagtgaatctgctctcaatccattcttccattttaattccaatataattcccggatacctgttttctcttggaataaggctgatatcatatcttccattgcctgattccctgttggatttaatcttatactgattatccatcaatgcaatcagaccaagcattaaaccatgataaaagccctctgctcctccatcataaaaacttatggatttatccatgtattcggatattgcagcctgcaattttttataatcatttgcataaagactctctgcaatcttgttagcagtagttcttgtgatagcacctatctgcagcaaatgtgacaaaatttcattcttgtaaaccgctgcaatttccctgttaggaatggaaatctcgcacagatatgaaccatctgcctgcaaatcttttctcggtgttttcaaatatcctgccactaacaacagactatatatattagccggatcttctgcaatcgacctgtatacaacattctgatcaattctggcaataacaggctctccctgtaaaagtgcataaagtctctccgttatgtcatcagtagcgatttcaagtacatcttcaagaatctcattctttcctgtattaacccaatatgcctgtggaataccgcctttagaaatataattgataaccgaccacggattgtatatctcctcgttaccaaataaatatccatcataccattctttcagttccttttctttacctgacataccataatattcaagcattgcttttacttcatcacctgtaaatccgaagaaactgtcatacgcttcatccataactgaattaactgtcagattattaagtccactaaatatactttcctgtgcaatacgaagaattccagtaagaaatccatacgaaagatttctgttatctttaaatgctcctgagaagaaatttctcataaatccaataatctcatcatagaaatcttttgaatatccttcctgtataggcgtatcgtattcatcaattataataatcggtgctttgccatagtgcacagccagcatttttgacaaacgctcaagtgcagaagtaagttcaacttcattggctgtgccattaagaatctttaaaaaattctccttttcatactctgacagcttatcactgttaagcaattcctgatgtcgtccaaattcttcctgcaaaagtccacgaatcttatcaatagtttcctgccatgtatcaaatttaacatctttaaatgtgagaaaaatcaccgggtacttaccctgatgcgaacggtactcttctccacactgccagattgcctgatttttaaaatatttgcttgtatcctcatcagatatctcaaagaaaacccttaacatatccatattcagggtctttccaaatcttctaggtcttgtaaacaatgataccaatggcttctggtcaagaaattccttgattaataatgtcttatcaacataataatattctgactgcgcacgcacataatctgatatcccaatcggaagtgccttcaagccctttcccccagatttctttacatactttcccgttgaaatccttttatcagcaggttttgctgcatcatcaggaattctccatgttccattctccttaacagccccagccacttttccttttttgcacatatcattcacagatcttgaagaaatcacccattctgcagctttctctttacaacttttcatctgaacctcctctctcattcccaccgtcaacaatatatcttacgcaaattatagcattttatgcgaagaatatcaattttcgtccgcaatatatcaattttagcatgaagaatatcaatttaatttgatatattgcgttttgaaaaaacattcttctttttaacatctaattatagtgaaaatgcggactcctctcggaatccgcatttttatattaaatctaataaatcaaacattcaatcagcactaccgcaccatcattccaccttgcaatcctgccattatacatctcatcagcttcctgctgtgaaacgagcgactgaccgcggtttgctgacctttccgctgactcttcagaagcataataatcaaccttgcattcatctacaacatttttcgtgcctgaagagaaatcataaactgtgaacctttcaagtccatccccctgccatacgccttttattccgtccataatataataattaccattcgctgaaactatcgaaacaaatccattttgtgagtggctgtttccaacctcttttgtatacaaaatctgacctgtaatgccatctttgacagttacagtgacatattttcttgtatcattgagtgcctctttaacatcactgatatccccggcatatccgtatatctccattgccacatcatcatcaacaccatcatgcgtaaggtcgtacctatattctgctatgagataattcttcattttatcatcattctgattgtcagtatctgtctcaaacatgctatctgtcgatttttcagcactgcctttaacattagacccgccaaacgcaaaaactgtaattgctgccaccgtcactatcattacaaatgctacgcttttgtatgttttcttattgccagcgattctctcaatccttttcttaagttcacgaaaaccagaggacgctcctgataaaagatatatatccgataatctgcctgaacgtctggcggcagcatttaacagcacctcaccatatttctgtctctcgcttgcactgcaatttcttacaaccgcttcatcacagaataactcgcagtcctctttgtgaaaatgtgctgccagccacacaagcggattaaaccagtatatacatacacacaacattctcactaacgcccaccagttgtctctgtgtctgtagtgagtcaattcatgatttataataaattcattgtttcctgtattagtgttaaggtacacagccggacgaaatactccgtacagacaggccgaatccacaacatcagtaatataaatgctgattcgcccactattacctgtcttgattcttgtagatataagtcttctgtaaaatatgatattgctgacaactacaatcagaaacataagtgccatgccagtaaaccatatacccagcatatagcttataatatgaatattgtcaggcttagcactacttgtttcctgcatttttttatctgtgtatgtttcgttttctgcctgcatcctgccatctgacatcacatctgttatccccttggtattcccggatgtctgtacatttccagctatcttaacattatcaccagtatcaggctgttcttcattcgctacagcgctgccctgcacacgcttaatattatctaacagataatcagccacatttacaacatttccaaataactgcacaggtattaaaagacgcattgcaactaacgcccacaatacacagattgctccgctctttactctgctgccaaaaaatttccgcaaaatcattaccacaacaatcattatgcttgatgttataactacattaatcagctttctcacctgccttcttcaatatagcctgcaactcattaatctcatccttgctaagttcgttagatttgacaagcgtgctcatcatcatattgactgaacccttaaacactctatcaagcagactctttgtctccgacaatgccacatcttccttctttaccagcggataatattcccttgccctgccgccttcatggtaggcagccagtcctttgtctaccattcttccaagcattgtaacaaccgtacttttgctccagccagtctcctcttcaagtatatgatacaactgcatcatagtatatggctgttcccatagcttctccataattgtccattcactgttatttaaagtcatctctgcctctcctgtcgttctacatctgtcaacctaaagatatcactttgttttacaaatgtcaacctctttattttaaaaaacggactctggcaataaccagaatccgcgcactccacatattcaaaaaatatatattatacaataacatttcgctcttccccagccataaatgccttgatattaagatatatctcgtccatcaggcgggttctcgcctcgtatgtcgcccatgcaacatgaggggtaacgataagcttgttgctgtccttaattgtaagaagaggattgtccttagcaaccggctcagtggttattacatcaagtcctgctgctgcaatcacgccttcgttaagcgctcttacaaggtctgcgtcattaacaatcgggccacgtccaagattcagaagaactgcgctgctcttcatcttcttaagtgtctcataattaaacagattttctgtatatttgttaagcggtgcatgaattgacacgatgtccgatttcttcaaaaattcatcaagctcatatctttcgtatggcacatcatagctgtgaccgcttgctgaatagtatattacattacagccaaagtctgccgcaatcttagcaacgcctcttcctatattgccaagtccgacaattccccatgtctttcctgccagttcgtgaaacacatttgcaaaatgtgagaagcaaggccactctgcatactcgccgctctttacgaaatcatcataatatctcatcttctcgacaagataaaatgcaagtgcaaatgtgtgctgtataactgactgtgttgaatatccagcaacattggcaacccttattccatgcgctttggcatattctatatcaatattgttgtagcctgtagctgcctctgccaccatcttaagattaggcgcggctgccatgcactctgcgttcatgttagttttattaataataacgacatcaggattatgctctttcattcttgcaacagcttcctcataagaacttaagctgtatgtcacaacttcgccaagcctgttaaactgctcaagcgaaatatcatctccgtatgtcatagtttccaacataagtatcttcataataatcctccgtttctgcacatttttgcataattatcgtacatttttaataatttccctgtactgtttatttagtttcacaagctccctgtctacattttttagtaaaaaaagtcgtcctgcacctttcattttcttaaatggttttacagtcagcctgctatgtatatcgacatttccgctgtcatcatctgcataatttctgattgctattaatacagtctgcatataaacctcccaaaagacattgaatactaccgcattatacaacttaattaaagcagatattgtcgaaccaccgtctgattaaatatttgcaacaagttccttcataactttgacattgttagcaattgcgagcttttcaaatgcagggtaatccattgttgcgctgtcatcagccttatctgatatagttcttaatattacaaatggaactttattaaggtaagaaacctgtgctatcgctgctccctccatctctgtacagaagccatcgaaattgctgttgattctctccttaacagccttgtctgatatgaactggtcgccgcttacaactctgccgacatgaactccaatttccggaactgcatttttacaagcctcgccagcaagtttaataagtctttcgtctgctgcaaatgaaagtgtgtccattcttggaatctgtcccagaggatatccaaatcctgtcgcatccatgtcatgatgaagaacatctgatgaaataacaacatctgcaatatcaatccctgccttaagtgaaccagcgattcccgtattaataatgtagtcagccttgaagtcatcaacaagaatctgtgtgcatgccgcagcattaaccttaccaattccgcttcttacaataacaacatctttcccagcaagctttcctgctttaaatgtcatgcatgccttagtttcctcgcgggtaatctccattacctcaacaagctgttctacttcttcgtccattgcaccaataatacctatcataaatcctccttatatatccatttcaaactgcatacattataattgaacatttgcaataaaacaacttatgctttttcatatcttccaaaggtgttataatatagtcaggtatgtatcagaagctgtgtgagcaaatgataaattagcacagagcacgcttgcgctgcttgtcgttcgtagcggtactaagcttgctataagcagatatctgcgatatctgtttacagcgcgctaagtgccgacgactccaaagcactctgtgccactttatcatttgctcacacagacacatacatccctcacccaattatatataagcagaaagattagtgtaaataatatatttttacactatgtgcctaaaacagcacaagaatggaggattaatatgaaattcaagacatcaggcgtatgttcacgtgcaatagattttgatgttgttgatggaaaggttgttaatgtgcatttcactggcggatgtgccggcaatactcagggcgttgctgcccttatcgagggcatggacattgacgaagctatcaaaagaatggacggtatcaaatgtggctataaagacacatcatgtcctgaccagcttgctaaagccttaaaggaatataagaaagataatgaatagtgtcgcgcgatttaaaagagtttatgtcgagataacaagcagctgcaacctgcactgttctttctgtcaggaaactctgagaaaaccacattttatgagtgtggacgaattccgcacagtgattgaaagaatcggacattatactaattacatttatcttcatgttaaaggtgagccgcttctgcatccacagcttggtgaaattcttaagatatgtcaggacgctgatatgacagtaaatcttactaccaatgccactcttattaaagagaagcttcctgttttactggagtatcctgtgcatcagattaatgtgtcgcttcacagtgctgacgataacgactgcattgacatggattcttatattcataatctttttgaatcctgcgaaacgcttcttgataagactgacactgagatttcactaagactctggaatactaagaaagagccatttctgtttggtgagaagaactgcacaatcaagagacatctttatataaatgttcagtctccgtttgaatggcctgatgtgaacagcacttattgtaatgagcgcggattctgtcagggactccgccagcatatggctattctgtgtgacggcactgtcgttccgtgctgtcttgacggtaatggagtgatggctcttggcaatattcttgattcaacacttgaggaaatcctttcaagcccacgaagcgttgcatttatggaaggattcaagaaaaagactgcggtcgaaccgctctgtatgcattgcagctttaaggaaagatttgctcataaaatgtaatgatacatttgaacaaatcggacattttattatattttcaggagaatgacctatgaaaaaaatagtacttaccggtggtggtactgccggacatgtaacacctaatattgccctgcttccaagccttaaagaagccggctacgaggttttctatatcggctcttataccggtattgagaaaactcttattgaagatcttggaattccttattatggtatttcatccggcaaattaagaagatacagaagtcttaagaatctgtctgatccattccgtgtgcttcatggactttttcaggctaagagacttatgaaaaaaatcaaacctgatatcgtattttctaagggaggcttcgtgtctgtacctgttgttcttgccgccggaagccgtcatattccagtaattatccacgaatctgatatgacacccggccttgccaacaagattgctatgagaaaagcaactaaaatatgctgcaatttcccagagacactcaagtaccttcctgaaggaaaagctgttcttacaggttctcctatcagacaagagcttttgcttggcaataaagcagccggacttgacctttgcaacttcacaactgacaaacctattattcttgttgtcggcggaagtactggcgctgtccatgtaaatgaggctgtaagaagcattttacctgagcttcttaaggattttcaggttgttcacctgtgtggaaaaggcaagatggacgaatcactcaatggaactcccggctatgtccagttcgagtacataagcgagcagatgcgcgaccttttcgcaatcagttctatcgttatctcgcgtgcgggtgccaatgccatatgcgaactgcttgctctcaagaagcctaatcttctgattccgctttctgctaatgcaagccgtggcgaccagattcttaatgccaattctttcaaggagcatggttattcaatggttcttacagaagaggatatgaataaagatactttacttgccgctgtccgcaagctttacgctgacagacaccagtacatcattaatatggaaaaaagtgagcagcaggattctattgacaaaattatgaatttaattaaagataatagtaaataataatccggaggtgattttatgggcgctgttaaacatagccgtcagcgtgacgctatcaaaacatttcttatgtcacgcaaagaccacccaactgccgatgttgtatacacatttgtcaaaaatgattttccaagcataagtcttggcacagtttatagaaacctttcttttcttgtggagcatggcgaagccgtcactgttccatgtgaggacggatttgtgcattatgatgccaacactgcaccacatctgcattttcagtgcagaaagtgcaaatgtttaattgatatcaccaatccatctgataatgaaatccttgaaaatctcggggctaatgtggcatcacattttccgggcaaaatcgaggctggttcagtatgcttctatggattatgtgaaaaatgtgcttcggaaaattaatatttttataagtcagcaaagcaaaataggaatcattcctatttttgttgacaaactgatttatttctgttatattctagttacgaactgatgaaacattttcagaagttccgataagtaaagttcaggcttatgcctgttatgtttataaacgaaaggagattattattatgaagtatgtatgtacagtttgtggttatgtttatgaaggagaatctcttccagcagatttcgtctgtccagtatgtaaggctccagcaagtaagtttgctgcacagacaggtgagagagaatgggctgctgagcatgttgttggtgtagctaagggtgtaagcgaggatatcgttgctgacctcagagctaactttgaaggtgaatgttcagaagttggtatgtaccttgctatggcaagagttgctcacagagagggttatccagaaatcggtctttactatgagaaggctgcatgggaagaagctgagcatgctgctaagtttgctgaactcctcggcgaggttgtaacagacagcactaagaagaatcttgagatgagagttgaagctgagaacggcgcaacagcaggtaagactgaccttgctaagagagcaaaggctgctaaccttgacgcaatccacgatacagttcatgagatggctagagatgaggctagacatggtaaggcattcgagggacttcttaagagatactttggttaattgtaaaaccaattgaatcgcataatataaggattcaaagaggaataagtttttggacttattcctctttttaatttctccttttccttgaattcgacaatcttaaatagtataattttgttatgatttattgtgtaattaaatatttgtagagaaggagatatggattatggtttcatggaacaatttagacacactttcatcttacaaggagttagcagatgttaagccagcctgtcttacagaggttatgtctggtgataatggtgcagaacgcgttaagaattacagcgtacctatggctgccggactttcatataactacgcatctaagcagattaatgaaaatgtgcttgctgcacttgaaaagctcgctgatgaggctcagcttgcagacaagtttaaggctttatataacggagaagttgttaacactggtgagaagagacttgttctccatcatatgacaagaggtcagttaggtgacgctgttgaagctgatggcgttgataagagaacattttacaagacacagcaggaaagaattgctgaattcgctaacaaggtacataacggtgagattactaatgcatccggcgagaagttcacaactgttgtccagattggtatcggcggaagcgacctcggtccccgtgcaatgtacatagcacttgagaactgggctaagaagaacgatgcatttaagatggaagctaagttcatcagcaatgttgatcccgatgacgctgccgcagtgcttgcttctactgatgttgcacattctatattcgtacttgtttccaagtcaggaacaactcttgagactcttactaacgaatcatttgttaaggacgctctaaagaaggcagggcttgatccttctaagcatatgattgccgtaacaagcgaaacttcacctcttgccaagagtgatgattatttagacgcatttttcatggacgattatatcggcggacgtttttcttcaacttcttcagttggcggtgcagtattatctctcgcattcggacctgaagtatttgcagaattccttgatggtgctgcagaggaggacaagttatcagctaatcctgatatgcgcaagaacccagagatgttagatgcccttatcggtgtatacgaaagaaatgtattaggttatccttgtacagccgttcttccatattcacaggctttaagccgtttccctgctcatcttcagcagcttgatatggaatctaacggtaagtcagtaaacagatttggtgagccagttacttatcctacaggaccagttatctttggtgaaccgggaactaacggtcagcattcattctatcagcttcttcatcagggaactgacattgtgccattacagttcatcggatttaagaacaaccagttagaaacagatgttacaattcaggacagcacaagccagcagaagctttgtgcaaatgttgctgctcagattgtcgcatttgcatgtggaaagtcagatgagaaccttaacaagaacttcaagggtggaagaccttcaagcattattatcggagacaagcttactcctaatacacttggtgctttacttgctcacttcgagaacaagattatgttccagggcttcgtatggaacatcaacagctttgaccaggaaggcgtacagctcggtaaagtacttgcaaagaaagtactcgcccatgatacagacggtgctttaaaggtatatagtgatttacttaatatctaacgaaaaaagtcagggacttaagtttcattaagtccctgacttttatttttctaacacacttattcttttttctaacaattcttttctaacaattctacaaaatcattctttaaatgttctggcaataatgactgcatacacataggcagtccttaaaatctccattattattccctcttctataaacttgtcctttaaacccactatttcattaattttcacaatttagtaggtcttttttacatcgttagttggtttataatgcttcttttctacttaaatgcctactaattcatcacatttcacaatattagtaggtctttttcttatatgtctataatgctagatgctttttgctggctaaaaaacctactattcttgcataactcataaatttagtaggcaattttctttaaccaccttaattctcatcatatttttccctcaataaacctactatttcatcacattttacaatattagtaggcttttcccaaacatatactctgatttcatgttccatttgacactaacttgtctgtatatacattttatcacaccctaaagggtataaaaatagcagagacttaaatttcaagtccctgccttttttctaatatatattactgttcattaaaaagtgctgttgaaagatatctgtctcctgaatctggaagaagtgcaacaattgtctttcctgcattctctgggcgggctgcaagtatctgtgctgccttaagtgctgcacctgaagagataccaacaagaataccctcgctctttgcaaagcttctaccctctacgaatgcatcttcattctcgattgcaataacttcatcatatatcttagtattaagtgtatctggaacaaatcctgcaccaataccctgaatcttatgtggtcctgcctcgccctttgaaagaaccgggcttgtagctggctctacagcaacaatctttacatccgggttctgtgacttaaggtattcaccaacacctgtaacagttccgcctgtacccacacctgcaacaaatatatcaacctttccttctgtctgctcccagatttctggacctgttgtagccttatgaactgctgggttagctggatttacgaactggcctaagattactgaaccaggattctgctcctttaattcctcagccttagcgatagcacccttcatacccttagcgccttctgtaagaacaatctctgcaccataagccttcagaagatttcttctctcaactgacattgtatcaggaagagtaagaactgctctgtatcccttagcaactgcaactgcagcaagaccaatacctgtattaccagatgttggctctataatcattgctcctggcttaagctcacccttcttctcagcatcctcaatcatagcaagggcaaccctgtccttaactgaaccggctgggttaagatactcaagctttgtaagaagtgtaactccttcaattcctgcattcttagcgtaacggcttgcgttaagaagaggtgtgtttccaataagttccaatgcactgttaattactttactcatgttttatcttcctccttattatgaatgcatttgcaaatatgcttttgcgttcctattaacctactaacttgatgtgtaaatgtgttgttgaatataaaataccactatcagtcttcaatgtcaacaccattttcatgacgagttttaaccattgcatcatgtgtaatatctttaataacttcactggcaattataagtcctgcaacagatggtacaaatgcggttgaccccggaatatcgcgtctttccgtacatttatgggctgctcccggaggacatatgcagttagtccggcagcttattcccatatcttcaataggacgaaccggcttctccttagaatatactaccttaaggtgcttaacattcctcttctttaattctcttctcataactttggcaagcggacataccgatgtcttatatatatcagcaacctcaaattccgccggattaagcttattaccagcacccatactgcttataatcggggttcctgcttcctgacacgccattacaagtgctatcttggctgttacagtatcaaccgcatcaactacatagtcatattttgaaaaatcaaactgatctttagtctccggaaggaaaaaacatttgtgtacagtaacctcacaattcggattaatatcatgaattctctctttgcacacatctgtcttatactgtcctattgtttttcttgttgcaataatctgcctgttaagattggtaagacacaccttatcatcatctatcacatcaatcgcacctactccgcttcttacaagtgcctccactgtatatccaccaacgccgcctacaccaaatactgcgacacgggaattttctaatatatccatagcttcttttccaaacagaagctctgttcttgaaaactgatttaacatagcttgtcctttctttgcttttttgtatctaaattttaattcctacttacatggtatgtcaataattattaattttatataaaacgcttgcattatcaaactatttgttatattatcatttcaacaagatgtagtttttaatactacatgtcattatagaaggagggatttattatgacaacttttgcaccagcacttcatttacagaatgataatatacacactaagataaaggctcagatgattattaaagaccctggcagttcggtaacacattttattggcatgctttgcgcaattgcaggattattcccacttattcttaaagcagcctcttatggaacaaccgtttctgttgtttcaatgactgtatttatggtaagtatgattcttctatatgcagcaagcacaacttatcacacatttgatatatcaagtaatgtcaatattgtgctgaaaaggcttgatcactgcatgattcctgttcttatcgcaggctcatacactccagtctgcctaattgtacttcataatatatatggctatgttatgtttggaattgtgtggggaatcgccattcttgctatcgcattcaagcttctctgggtaacttgtcctaagtggatatcttcagttctctacattgtaatgggctggacatgtgttatggctcttcctcagatatattcagcacttgccggagccgctttcttctggcttctcgccggcggaatcttctacactgttggcggcgtaatatatgcagttaagatgcctgcatttaatgcaaatcatcctaatttcggaacacatgaaatctttcatgtatttgttatggctggaagcctctgtcacttcatactgatgtataacttcgttgctattatgtaatcaccatacacccataaaatatgtaagcggcggattcccgccgcctttatctatattaagcacctgctttgccctttcaggcgttatcccacttatataatggagactgccggctgtttctccgcacacattgcttgtaaaatcattaacaggtgccggttttacgcgtattgtcaacaattactcgccgaggtaatccataggattcacaggaataccgtcctttgtcattgcaaaatatattcctgggccctcttctttatagtatgctgttggctcggccacggtaccaagaagctgaccggctgtaactgtatctccaatcttaacattcacatctgaaagcataccagttgtcatctcatatccattacctgctgcaacccttacagtaagtcctgtttcagtattctctgcaacatcaacaactacacctgataccgctgcacataccttagttccgacatctgaagcaactaccataccaggactgcatttgtacatgccaagagtcttaaaatacacagtagaatccatattatatccaagcgtaacagttccgctgacaggccagtatataagctctccctggtcaaatgtatacttacttatagcatttgccataacctcagcttcagtcataggcttgaccgcctgttcctctgtctccggctcctttgtctgctccgtaacctcatcctcagttccatcaccatcatcagacatgcttgctcttgcgttagcattaataatatcatcatcaccaacagttggttcttccactggaatatcagggtcatcatctgtcttgatagccacatttccttctgtttcattcagattgaccagattgttgttcttagatttcttaacattctgtgctactgaaaatatcccaaatacaagcgcaacaataaccgccagcgtaataaccgctgacacaaccttaaccttgtcggttcctcgcgttcttacattcgccatattaacatcctcctatcatttcgcaaagctttgatgttaatatgttttccagattcgtaaagtttatactgtttttaaatgtaaaaatccccgcacacaaagtgcggggaaatattcaataatcttctgacaaatccgatattacatctcaacaggagtcttagtaagcttccagatttctgtagcatactcttcaatagttctgtctgatgagaatttacctgccttggctgtattagtcataacagtcttagcccagccgttcgtatctctgtatctttcatcaatctttctctgagcctctgcatatgaacggaagtccttaagaatgaagtaagtatctgctcttctacctccatcattattaagaagagaattgtagatatctctgaacatctctgtatcctctggagaatactttccattgataagttccataagaacatctcttatttcctgatcattgttaaagatttccataggatcatatccgccctcattctcgaaacggataacttcatcagagctgagaccaaatatctgtgcattttcagcaccaacttcattaacgatttcgacattagctccatccatagtaccaagagtaattgcaccgttaagcatgaacttcatgttacctgtacctgaagcctccttagaagctgtagatatctgctcacttacatctgctgccgcaaatataatctcaccattagatactctgtagttctcaatgaatacaaccttaatctttccattgatagaagcatcattattaataacgttagctacattattgataagcttgattgtctgcttagcaatcttatatcctgctgctgccttggcaccaaagataaatgtccttggaaccatgtcataatcaggatttctcttaatctgattgtacagatacataacatgtaagatattaagaagctgtctcttatattcatgaagtctcttaacctgtacatcgaagatagaattaggatcaacatcaataccattatgttccttgatatacttagcaaggcgaaccttattcttatacttaatctgcatgaaatcctgatgtgccttaggatcatcaacataaagcataagcttctcaagctggcttaaatctgtaacccagccatctccaatcttatctgtaatccagtctgaaagaagcggattagcatgctttaagaatcttctctgggtaataccattagtcttattattaaacttctctggcatcatctcatagaaatctcttaactcctgcttctttaagatttctgtgtgaagctttgcaacaccattaacagaatatccggcaacaattgcaagattagccatcttaacctgtccgtcatagataatagccatcttacgaaccttctcctggtcgccaggatatttagccttaatctcttcaacaaaacgacggttaatctcttcaacaatctggtaaattcttggaagaagtcttgagaataattcaataggccacttctcaagtgcttcagccataatcgtatgattagtatatgcaacagtcttagttgttacatcccatgcctcatcccattcaagtccgttctcatccataaggatacgcataagctctgcaactgctacagttggatgtgtatcattaagctggaaagtaaccttcttataaagattcttaacatccccgttattcatagacttatatctgtcaacagctctctgtacacttgctgatacgaagaaatactgctgcttaagtcttaattccttacctgcataatggttatcattaggataaagtacctcaacaatattctttgcaaggttctcctcctcgatagccttctggtaatcacccttatcgaaagagttaaggttaaacgtattaacaggctctgcgtcccagattctaagagagttaacagtattattgccatatccaagaaccggaatatcatatggaacagcgattacagaacggtaatcttcctgaacgaacatatctcttccagtcttctcatctctgtaagaacgtacatatccaccaaatttaacctcatatctgtattcagatctcttaatttcaaatggattgccatcctttaaccagttatcaggaacctctacctgatatccgtccttaatctcctgcttgaacataccgtacttataacggataccacatccatatgcaggatattcaagagttgctaaagaatccatgaaacatgctgcaagacggccaagaccaccattacctaaagctgcatccggctcctgatcctcgataacattaatatcaagaccaagctcgtcaagagcttccttaatctcatcataagcacagagattaatcatattgttaccaagtgcacgtcccataaggaactccatagacatataataaaccatcttaggatcgtccttctcatactgcttatgagtagcaatccatttatcaatgataatatccttaacagcatacgaaactgcctgaaaaacctcctgctgattagcctcttcaatattctttctgtaaagagacttgcagttactgattacattcttcttgaattcttccttactgaaattctgtgttaaacttgtcgccatgtatttaaaactcccttctgaatatggacggctccccaatacgccgatataccctgtaaaaactataatccgccccacaatagatgttttaattatacataataatatttacaaatgcaaactttattattcaattgtcctgccacaaactgatatatattttgtaacgattagtttgttttattttatcttcttctgaaaatccataataaagaataatatcctgattaatagtctcgtattttgttatcatttcttcaccacaagcgccgccgccaatatagtctgtattctcattaatgataaaatacatataatcttccccatcatcttttacaagcagtcttatattatctatatcatcttttaacaaatcctcttgtgacatgaatcttaatgcgattttatattcatcactatccttgtttatttcataaaatccatataaatcaattaaacgattatatacatcttttaaacttttaccttccatgactgctcctttacatttatcttattgacaccagctaccaatttataaatttattttacagtattcccaacatttttcaacatactttacataaatagtttttttatacaaatgtattttcataaaaaagctgtgcgccagccccaaagaccagcacacagcttcatataacttttattcaattacctgcattaagcaagcttctcaacagcaagtgtaaccttctcaccgttgatatcccactctttctcaaatcctgcagtctttccagtgataatatcctgtgcaagaactacagtcttaacctgagcggcatttctgttaacaatatcagctatcttgtcgttgcctgatacatagagattaatcttatccataacctcgaaaccagcgtccttacgcatagtctgaaccttagagataacctctcttacgaaaccttcctcgataagctctggagtaaggttagtatcaagaacaactgtgatacccttgtcgctgcttgcaacaaatccttccttctgagtcatctcgataagaacgtcgtccttagaaagctcgatagtctgaccttcaacatttaactcaaagcttcctgactcgttaagcttatccatagttgcgttaccgtcaacctctgtaagagctgttctgattgcattaagaagctttccgtattttggtccgagagtcttcatctgtggcttgaatgagtaagatgtaaatgctcttacatcatctgtgtattcaacttccttaacattaagctcgtcagcgataatagctgtgtagaactcatcaagcttccagtctgccttaatgaacatcttgccgattggctgacggttcttgatattagttgaattacggcatgcacgtccgataacaactgcgtctaatacatcatccatagtttcctcaagcttcttgtcaatgaactgctcattaaccttagggaagtcgcataaatgtattgaaataggtgcatttttatcaatgctgcatacaagatttctataaatgctttctgtcatgaaaggtaccattggtgcagaaatctttgcaagagttacaagtgttgtgtaaagagtcatgtaagcatttatcttatcctgctccattcccttagcccagaatctctcacggcttcttcttacataccagttagaaagctcatctgtgaagtcctcaagcgctcttgcagtctctgtaatcttgtagttctcaaggttagtatcaacgaatttaaccaaagaattaagctttgataataaccatttgtccataactgaaagcttgtcatattcaagctgatacttagtagcatcaaaattatcaatattagcatacagtacaaagaatgcatatgtgttccagaatgttcccatgaactttctctgaccttctgaaacccactcatccttgaatctgttaggaacccaaggagctgaattctcgtagaagtaccaacggattgcgtcagcaccatgcttctgtaatgcgtcaaatgggtcaacagcgttaccctttgatttactcatcttctgtccatctgcatcctgaacatgtccgagaacgataacattctcatatggagctttgttaaagagcagtgttgagatagcaagtaatgagtagaaccatcctcttgtctggtcaacagcttcagatatgaacttagctgggaactgctgctcgaataattctttattctcaaatggatagtggtgctgtgcaaatggcattgaacctgaatcgaaccagcagtcgataacttctggaactctcttcattgttccctgacacttaggacacttacatgtaactgcatcaacatatggtctgtgaagctcaatattatctggacaattgtctgacttttctttaagttcttcgatacttccgatagacatcatctcaccgcagtcctcacactgccagatattaagaggtgtaccccagtatctgtttcgtgaaattccccagtcctgaacattttcaagccatgctccgaaacgtcctgtaccgattgtctctggaatccagttgattgtcttattattagcaattaagttagccttaacttctgggtctgtcatcttgataaaccatgactctcttgcatagtagataagtggtgtatcacatctccagcaatgaggatattcatgctctaccttaggtgctgagaagaggattcctctgccctcaagttccttaagaacctcaacatcacagttgatagcgcctgcttccatctccttcttagttggcttagcacgcattcctgcaaatggagtctcaggcttcataacaccagcctcgtctaccatctgaacaaatggagcgtcatattttctaccaactcttgcatcgtcttcaccaaatgcaggtgcaatatgaacgataccagtaccatcttccatagttacataattatcgcagtatacgaaaaatgctttcttgtgctgcttgtcagcggcatcctttgcacactggtaaagtggctcatattccttatattcaaggtctttacccttgtattcttcaataatctcataagcaggtgtgccttcttctctctcgattccaccaagaaccttgtcaagaagtgcctttgccatgatgtatgtgaatccatctgctgccttaactctcgcataagtctcatctggattaacacaaagagcaatattagagcagagtgtccaaggagttgttgtccatgcaaggaaatatgcatcctctccaacaatcttgaatcttacaactgctgtacgctctttaagagtcttatagccttgagcaacctcatgtgaagaaagaggtgtaccacaacgaggacagtaaggaacaatcttgaagcccttataaagaagacccttatcccagatctgctttaaagcccaccattcagactcgataaagttattgtcatatgttacatatgggttatccatatcagcccagaaaccaacagtagatgagaaatcctcccacatacccttgtatttccatacagattccttacaatgcttgataaatggctcgataccatattcttcaatctgttccttgccatcaagacctaacatcttctcaacctcaagctcaacaggaagtccatgtgtatcccatccagccttacgaggaaccatataacccttcattgttctgtatcttggaatcatatccttaataactcttgtaagtacatgtccaatatgtggcttaccattagcagttggaggtccgtcatagaatgtgtaagttggaccttcctttctgttatcaatactcttctggaagatatcattgtctttccagaacttttcaacttctttttctctgtctacgaacttcatgtccgcagaaactttctgataaatcattgcagcttcctttcttgccttgtggcttataatttcttttcgtaagccaagtctctccgtgactttgttgtatacgaaaaaaaccctctgccgtaatacaacagaggggtaacatacttatcctaaaatctgaatgattacgacatactatcatatgcgtccctggctttaaccttacgatgggattaccgtccccgcttagtctcgtgatgatttcagcgaagatgctcagaagtgatgttcagatggatagtactcacaccggctctcaccatcccggctcgctcatgcttttcactccaacctactgtcttcgtcaatgcatttgattagattttatataataaatgtttagttgtcaagctgtcataaccaacatgtgcaagttttttatgctaattatacatatcttctataggaattaatctgacatttaaagccttggcattatcctttacccaatcggtaaatccacttaatgaatatagatgatattcagcaaccttgtatttcttgtcgattaaaccatctctgtccataagttcttcaagctgtttcttatccattggtgtattcctgaatttacattcaccaagaatcgccttattctctgtcgtatccagtccaacaacatcaatatccgtctgctctttcttaactggattagtaccgaaccacttacctgcctgaagaactgtacaactgaatttattagaaaatgcgttcattaacagatactgtctgcacattttctcaaatatttcgcccatatactcatgaagctttggttttacctgacttaaataatactgttttccattatcaatctcaattgctgcaactgctctcggaataaacttatgccagaacataaacattccatctgacaatgaatacatgactttcttcttattattctcttccgtgattgcacatgtcttttcaataatacgggtttccagcaaatggttaagaatattgtggacagacgcactttccagattagttttatcctttatctcaacggctttattagctccattggcaattgctgaaacaacatcatcatatacaggtgcattcctgaactcctgaactaacaggtttcttggttcttcatacatgaatcctgatggattaaaatacaattctgcaatattatcatcaagacttttgtccgaatcaaacatagagatatatttggcaactcctccagtgattccataacaaattgctttttcctcacacgaataatcaggtacaaacaatgcagtttcaagataattaaacggttttaaatctatctgcatagtccgccttccgtatatcggactcttactgctaagcacttcctgttccataaagctgatagatgaaccagacagaataagaaaaatgtttttattaagccagttcttatcaatctcgacctgcaaaagcgataaaaattctttatctgcctccgcaagataaggaagttcatcaataacaagtacaagctttttatctccaatattgttggtaataaaattaagtatgtcttttatatctgtgaatcttaccccgttaattcccggcataaaatagtcaacaacaacttccccaaataactcaatatttctttctgcactaccctttattgccgtaaaagctatatgctcttttcctcttataaattcattgataagagttgtctttcctgtcctccggcggccatatacaatgcacatctggaaagagttcttgctgtatgcagtttctaagcttttcaattcattttttcttccaataaatttatcacacatattacgacctcctgttttaataaaattaattttagtaaagttatctttactaaacctatttttactaaaattagtatatcccataacattttaaaaatcaatttatttactaaaaaagttgcagcaaccttaaccgttactgcaacttacatttacattattctattatgcttctgtcatcctgttcttagccacaattctcataatcagatctacgcttccgtcaattccataagttgaactgttaattgtgaggtcgtagttatctgcttcgccccacttcttgcctgtatagaacgcatatcttttaagatgtgccttatcctcttttgaaacatacttcgcagcctgcttataagtaagcttctccttgcttgtatggtaagttctctgtatacgcagtttcttaggagctgtgataaatatgcttatatgaggaatgtggttcttagtaagaatattatccgcatatcttcccatgataacatatggttcctgttttgctaaatcgaccagcttcttagatgtattaaagaactgtacatcagaccttgaaagaccatggtacctcttaaaatctctccaccactgagccggtgtccttgctgtcttattctggaataatgccctgtcagtttcctcatgttcttcattacgctgtaatatctcgttcatgatagatacatcataatagctgattcttaacttatcagcaagcctgaaaccgatatctgttccggcacagccatatgaacggcctatacatataataagattgtcatcctttccaaatctgtttgcaagattggacatattaagctctgcatgctccgggtcaataatatcatttccctctctcgcttcctgcatagccattgcttcatcaaatatctcaccatattcatgcattatttctttatgaagcttaggattcttttttgtggttcttgccatattacttataagtgcaagctcacttctaagaactgacgaatctgcactggatttaatcaaatcctttaaatcattaatacatttttccttgtttccctgatatacacgtcccagattagaacctgtagctttatatactttctcgtccagtgcgtatattctgttcgcaagttcagttattttatcattatctgccataatgcgcacctcctaattatataaagaataatagtgtgtcaataaggaatactggtacaaggcagcacaatgaccacacaatatacccaaagaagcttggcatcttaacaccattttcatctgatattgacttaaccatgaaattaggtgcattaccaatataagttattgctcccataaataccgcaccacatgatatagctgtaagcatttttgcaggaacaactccgagtgcagttgtaagtcctgacacaaatcccattgaaccagccgttgtaaggaatacaaggtaagttggtgtattatcaaggaaacttgaaagtgcgcccgttacccagaacatctgtgatggatgtgtaagtccaagctctgcgcctgcgctctttaaaatcataagagctggctgcatagtaataaatatacctatgaaaagtacagcaacttcctgaatggcaccccatgtgaaatggttcttctttcttatctctggattagttgtcttgaatgataaaaatgcggctaaaagaatcataactacttcaataagtgaagtaattgcaagcttaacctctccaaatataggaattgagattacctcgccggcagcattctggaaaaatggtacatccggaagtactccgcttaatataactgctgcaacaataattacgatgaatataatattatgtaatccctcaaatcttataagtggctcattttccttaatctccggcatataacctgctgctatatccttcctgtatgctctcttgtcaagaaaataaagcactgttagaagaataatcatgttaaggagcagtatcggaaagaatcttatactccagaagaaaggaacacctcttgaaaatcccataagaagtggtgggtcaccgataggtgtaaggcttcctcccatattagatataaggaaaatgaagaacaccataatgtgagccttatttcttctccatgaattcatcttaataacaggtcttacaagaagcattgatgcacctgtcgttccaatccagcttgaaagaagggttcctattccaagaagaataacatttactcttggtgaaccaacgaggcttccctcaactgttatgttacctgctacgcagaacagaccaaaaagcagtacaatgaatgtaagataatcatttaccagacattcaagtacagtctctgctgctgttccagcaccatacttaactgcgaacggaattatgaaaagcagtgaccagaatattacagcaaatggtctgtacttttcccaccattctccttttacaagtggaattatggctatacacaaaagcagacatgcaaatggtatacaaaaccataaaggcacattcgtcagctcggctgccagtgcaaccattggacaaatattaatactcataacttaagcctccgtaaaaaaacctgttccacacacggaacaggtaatcttaatattaaattatctctgcacatcaaaagacgaattcttcataagtctcttaatgtggtcaacacatgtgatattagtatcacctctgatagcatgcttcattactgaagaagcaacagcgaagttaacagtatcttcaggtgtcatattgtccataagggcatagataagtcctgatgaaaatgcatcgccgccaccaactcggtctactatctcaaaattaattgtcttgctctcataagtctctccgttagtataatagaaagcctttaaagagttgttgcttcctgagtgtacatatcttacagttctggcaatagctttcatgtgatactgctcgtctattgccttaaatactctgtccatatctttgaaagatgggtccattgtaagaccatctttaacatctgttccatcttctctgtatacatgaataggctcaattccaataagtacgtcaacataaggaaggtacttgctaagaacatctcttgcagtctcaaatgaccagagagtacttctccagttagggtcgaagctgacagtaagtcccatcttcttagctgccttaactgccatatccatcatcttacggcagttgtaagaaagagctggagtgataccgctaatatgtagccagtcataatccttaagaatctcctcgaaatcaacatccttatagtcgtattctgcaaatgcagaatcagctctatcatatattacctgtgaaggtctgacagaaacaccttcttccagataataaagtcccattcttccttctgatcttataatgtgcttggtatgcacatcattagacttaagataattaatagttgactttccaaggtctgagttaggtaatactgtaaaaaatgttgaatcaacaccaaggtttgcaagggaaaccgctacatttgcctctgctccgccataattaactctgaaatcatgtgtagttacaagtttttcatagttaggtggtgatagtctcaacatcaattcaccaattgctataaatttcatgtcttcctccaacgtcataatagattaagggtatcaaatacccagttttgcatattccaatgacatattacaccacatttgtacaaattgcaaacttgcatattactttttaataagatataattattttattaataagtaaggttaaggtacgtgtttatggatatatttgagtctctgaattctgtgcttgtagacttgttcaatgatatcttgaacattgaagaaagggctcttatcacagaagaatttaaggatatttctgttacagatatgcatattattgaagctgtaggaattgaagaacctcgtactatgtccacaatttccaagtcacttggtgtaactatgggaactctgacggtcggtatcaacggacttgtaaagaaaggatatgttacaagaaagcgcggtgagaaagaccgccgtatagtgtatgcctccctgacagataaaggaattgcagcttacaggcatcatgagaattttcataaagacatgattgagaatatcacgaaggatttaaccaaggaagaagctgaggtacttaccaagacatttatacggcttgaagacttcttccaccagcttccataataactgcattaataaaggaggtatttatgccagataataagaatttgctcaattttgatgatttagctgatgtattcgcacagcttaatgatattgaagatgcgccagaagaacttactgaggaagagaaagcctcccagcgcagatatgaagagattatcaagaaacataagaataataactgattataatacattgaaacagccacccttgggtttccccgcgggtggctgttccatctttatatgaaagtgtttgaaagaaaaaagcttagttattagctgtaatgcctgctgtcttatagacaaatgttacacttccggctttgtcatctgacttgcctaagaatgaattgtattcctgacctgccttaactaccgccttgattgtatcaacggctgtctgtgcgtctgagtctacaagctttgtgataggctcgattgcctcactgttaaactgtgccattccatcctttaatgtgattgcaccttcatttaactgtgtaactccatctgcaagtgttcctgagctgtcctttaatgtagctgttccatctgcaagctgtgaagctccgctctttaatgtatcattattagctgtaagctgtgaaagtccgctctgaaggactgctgttccttcctgctggagttttcctgcattaagatttaatacatataagcttgagcaaagagttccttctctgtatgttgagaacgaacctactgatgtgctgagtgtgttaagacctgtacttaatgtaccaagtcctgacttaagctgcttagaaccagcacttaactgtcctgcacctgtgcttaactggtcaattcctgctttaagctgtgttgccccagaattagctgacttaattccctcattaagtgaagtcataccatcaaaatatccggcatcttcaagagatgataatgttgtattgcaattgttatatgcctgataagcctgtgaaagtccgcttgtcattgtaacaatctgctcatctgccttagaacttactgtcgcttcatcaagctgtccgccagctgctgcacttacagtagcagcaactacctgcttgacagatgcatagttctttaatatataacctgttgctaaagcgtactgtgtcttacttgttacatcaggcgtctgtgatataccagactgtgccaaagctgctgcgattactgcctgctgctgtggtgttgctgaattaggattaattccctgactcatgcatgttactgcaaatgctactttatagaaacttccataagctgtactgtaactttcagctgcctgtgtctttcctgcttcaagactgctctttaactgtgtagttcctgctgataacttatcagaaccagcctcaagctttgtaagaccacctgataatgtatctgccccagtagcaagcgctccagccccagctaaagcactgtcaattcctgcatcaagtgttacagcacctgctgccagatcacttgcccctttagctgccgaagcaacactgctgtcaagattgttatccttaagagtattgtaaagagttccgattccgtcagcatatgtcttcatgttgttattaagtgaaactgaaccctcatatgcacttgcagcgccatctgcgtatgcatatataccatccttaagagaagaagcacctgtatttaactggtcaacaccatcagtaagtgctggaattgcatcacttaactgctgtgttccatcctgtaaagatacagttccgtctgcaagctggtttgctgcatcatctaatgaagcaactgtcttctttaagtcatctaaagtaatatcatcagcattcatatctgaaagaagattagatgttgcaactgacatagtcatatcaagtgaaaaatccttaacatctgctgttaattcaaaatactcaggaatatcaaggtcaagtgacttatcattaaacttaagattcatagtatccttaagtcctggcattgtcataccgactgctacaatattatcaccgaccttagtaagcttaccattagtaacctcaacatttgagaatacatctgttggaagcatcatgcctgtaatcattgtaaatggtacggcaactgtctgcttcttaccattaattgttacagttttcttctgattattagtgtaatcaaaatgtattgtaacctttccgctctttccggccaggtcttccggcttaattacctttccatcaagcttgtaagtaaccttcattgtcactggcgcattttcacttgactcagtcttattaagagtctcattgccgttagcgtctgtaatcttttcgttgacagtgatgtgattcttgttacctgaagcatcattgaatacataaacagtttcctgtcttgtgttagttgcaagtgtgctcttgttagacactgcaagctcgttagttattgcctgtgtaatagcagcctcagtgctgcctgctgccatctctgttacataagctgtatctgttcctgttgttgcagctgtcttagaaccgcagccaacaagacttgccgcagtaagaacaacacacattaaaactgaactatatctgaataaattcctctttaccataataaatcctcctaatttaattctgactgttcttcttaggcttaaaacctaaacttgtatgaataatcaccttatcaagtaatacaaaaagtgatggaagaacaaatataacaacaaacatactgattattgcgcctcgtgccataagtgtacaaagtgaagcaatcatatcaacactggctatcatacctacaccaaatgttgctgcgaagaaaccaagtgcgctgacaataatagatggaatagatgttccaagtgctattgatatagcctctttcttagagttaccagcggctctttctctcttatatcttgtagtcataagaattgcataatcgactgtcgcaccaagctgaatagttccgattactaccgaagatataaatggtatcgttgttcctgtataatatggaatacccatattaacaaatatagcaaattcaatagcagcaaccagaataaccggaagagatattgactttaatacgaagaaaataataaagaatatcgcaacaattgaaactgcactaactgtcttgaaatccctatcagtaatagtgataagatccttagtacaaggggcttctccaattaccatagatttagcatcatacttctttgcaattgcatcaaccttattaatctggtcattgattttatcagaagcaattgtgtaattagttgataccatcataatctggtattcatcacccttaagctctgaaacaagcgaatcaggaagcatttccgtaggaatttcccctccgagtgctgagtcaatacttaatgcaaatgaaattccgtccagatcatttacctcattcatcattgcattagaatcctctgctgaaagattactgtctgcaagaatcatatatatagaattagttccgtcaaagttctcggcaagcatcttgttagcctgcgaacagttaagcttctctggaagtgtatcagacaaatcatagtaaaccttagtattattatatccgtagattgccggaccaagaagcagaacgaatattataaggaatatccatgaatgattaacaatccatcttgccggcttatcaaaattcggcataatctctctatgcattgttttctcaagagccttgtcaaatgtaagaataagggaaggaagtattgtaacacaaccaataacacccaatacaacaccctttgccataacaacaccaaggtcaagaccaagtgtaaagctcataaagcagagtgctatgaatcctgcaacagttgttatggaagaaccaacaactgatgttagtgtattcccaatagcaaccgccatagcttcgtgatgatcatccggagtttcttccttagcttccttgtaactgtgccataagaatatagaataatccagagttacaccaagctgaagtaccgctgccagtgctttcgttatgtatgaaacctcacctaagaaataattagaaccaaggttatacacaattgccatacctatacttagcataaagaatactggtacaaggaatgaatccataaatatagcaagtacaatacataccagaacaaccgctacaagtacataaaaaggagtctccttttctgccattgtcttagtatctgtaactacagcagacatacctgcaatatagcactgattatccgtaacatctcttacttcctgaatagccttcattgtatcgtcacttgatgttgtatcatcaaagaatattgcaaacaatgtagctcctgaatcctcattttcaaaataagaacggaacttatcaggaagaatttctgaaggaacatcatctcctaccactccactataagagataactgacgcaacatggtcaacaccctcaaccttctttaccaatttagaaacatttgacttattcattccgtcaacgacgaccattgcataagcgccctttccgaaatcatcaagcaaaatgtcctgtccctgcatagtgtcgatatcacttggcagataatacaggatatcgtaattaaccctggtattaaagtaaccaagaactgatggaatcaacagcaggaagctaagaaccagaattggaattcttaacttaacaacaacttttccaaactttttcatataaataaccacgcctttctgtaagatgcaaataccaacaacccttagtcatataagtattcatgtctttaacaaatatgaccgatagtcattttcaatttcagttgacattatagcacctcaaaacacatagtcaatagaaaattgaccaaaagtcattttttaatatttattttataattgagttggtgtataatgttgacataagatgtggtgttgtaattattttcaggcacgcttgcgctacttgtcgctcgcagcggacactaaactcgttgcagttcctgcaacttgttaagtgccggcggctccaaagtacctgcaaataattacaacaccacatcatatacgcattttaactaataaaatagtattatataaaggtgagtgattgatatgggaaagcttgaaactaacaaacaacagaaacttacttctctgctgaatactgcatttaatctctttactacccagggggttgcgaagacttctattgctgagatttcgcagaaagctggaattgctaagggtacattttatctgtattttaaggataagtatgatataagaaaccgtcttatatcacatgaatcaagtaaattatttaagaatgccgtcgctgatttagaggaattttctaaagaaaagaacgaacagttaggtttcgaagaaaaaataatatttataattaatcatattgtagatgaactgaattctaatcagactcttctcacattcatatcaaaaaaccttagctggggaatcttcaaggaagctctcacaactaaggttgcatctgatgatattaactttaaagatgtatattatgaaatgattaacgctgaggatatctcacttgaagagcctgaaataatgctcttccttattgttgagcttgtaagttcaacttgctacagcgcaattctttataaagaacctgctgacatagatactatcaagccttatcttttcaagacagtacgtgcaatcatcaaagagcacactatccagtagctgcttacgctttcccttcaagctcctgatatatatccctctttgacacacctctgtcctttgccgcagctttcatggcttctttcttatccatgccctgcgacatatacatctgcacatgttctgccacactcatgttttcccactgctttcttgcttcagcctttaactgctcacggcttttaccggcaatcacaagcacatattcgcctctcggctcattattttcataatattcacatgcagattcaagcgtgaattccatcgaattctcatatctcttggtaagttccttacatatagtaatctgtctgtcaccgccaagcgtatctcgtagttccgcaagtgtcttagtaagtctgtgcggtgcttcatatataatcatagtccttgtttcacatgctaactctgcaagaacttcttttctctcattcttatccgctggtaaaaatgcttcaaatgcaaatcttctggtctcacgtcctgacattgtgagcgctgttatgcatgctgccggtcccggaagtgaagtaaccctgatacctgctgccctgcattgctttacaagctcctcgcctggatcagatatacccggagttcctgcatcggtaattacagccacatccattccacctaatattttatcaacaagaacctttgccttatcatacttattaaattcatgataacttgtcataggtgtctttatttcaaaatgattaagcagcttaatactgtttcttgtatcctctgctgcaatcaggtctgcctctgaaagcacacgcagaaccctgtaagtaatatcctcaagattaccaataggtgttgcacacagatacagcattcccggtccgtctttctttacatttttttcattatccataataaacctctatctattcatacattttaagaagcgcatcagtgtaagtaccgtccgtcttgtatacaataagcggttcttcaacaataagctgggaattacctcccttaaccgcttctataagcaccatattggcagccttattcgcataagggtataccagcctcattctcttcggctcaagatgatactttctcatagtgtcaaatatatcgacaagtctgttcggcctgtgaaccatatacattttccctttggatttaagacaacggcttgcttcccttataacatcatcaagactacacagaagctcatgccttgcaattgccttggcactgtccggattaacaataccgtgattttcattcatatatggcggattgctcgtcacaacattaaaagaagcttccccaaatatagtggaagcttccttaatatcacccttaacaacactgattctgtcctcaagatgattaagctccacatttcttctggcaagctgtgcgcttccctcctgaatctcaagagcactatatgtgctacctggattcttagactgcataagcaccggaataataccattaccggtacccatatccagcaccctgtccttcttccctgccctggcataagtagacaacagcactgcgtccattccaaaacaaaaaatatctgtattctgtataagctttagtccatctctcatcaaatcatcaattcgttcattaatcatcactaatatgggcttttccttcttttctttctaattcttcaagtgccttaagttccttatcatcatcaatgcggaccttatcaaatcttctttttctcttaaaacgaagctcctcaaccggatattccttaagttccttttcgtcattatcatgagttattaataccttaactctctgccttaaaacattgacacttgaaacctcaccaaccagtttatctggtgtagtaacagaatctcccacattaggcagatgactatttaattcctcatatgtatcctgctcattctttaaacaacacataagtcttccacacacacctgaaatcttagttggattaagtgacagattctgctccttagccatcttaatagataccggattgaattctggtaaaaatgtggcacaacataaaggtcttccgcaggaaccaattccaccaagaatcttagtctcatcccttactccaatctgtcttaattcaattcttgtcttaaatactgcagcaagatccttaacaagctctctgaaatcaattcttccatcagcagtaaaatagaacagcaccttattattgtcaaatgtatactcagccttaataagcttcatgtcaagattatgctttgcaatcttctcaagacatatcttaaatgcttctttttccttttctctgttttttaattctctttcatcatcttctggtgttgcaacccttataattgcctttagaggctggataaccgctgtatcttctacttctctttcacctagaacaacctgtccatattcaactcccctggcagtctcaacaataacatgctgtcctgtttcaactgaatatttcccaggtgcaaaaaaatatatctttccaacctgtctgaatctaactccaacaactttagtcatctatactctccattctatgaattttccttaatcgccataataagcaattcaataaccagatcaaaattaacatttgcctgaagtctcaccttaaccctgtcaatagaattaataatatcctgtaaaccttcatatgacatagtctgtgcctgactctttatcagtgtcatctggtcattaaatatgagcagattagtatcattcgtactcttaaacataagtacatccctgtaccacataagcataaggtcaaggtaatcatcaatagtcagcttataattggtaactcttttcaccgatgtcataatatcagccgaatccatatccttagcattcttaataacatccattacatcacgtcttaactctgcaaactcagtagattcaaccatagtcattgccctgccgattcgtccagctgcaaatcttgctgcaaatttgcactcgtaatcaccgatattatcatagtggtctttaagatatttaataactacatcatccttaagtggcttaagatcaagcacaacgcatcttgacagaatagtctgtaagaaaacatccggattattagcaagaagaataacaattccataagccggtggctcttcaattgtcttaagcattgcattctgtgctgcaacagtaagcttgtctgcttcatcaataatgtatatcttgtaaggactgctgtaaggcttaatctgcatatccgatacaagctggtctcttatatcatcaacaccaatacttcccggcttctcatgtccaacccagataatatccggctgattcctgcctgctgcctgcacacaggaatggcacaccccacaaggctcaacaccgcccgcctcacactgcagtgtctgtgcaaatgtgctggcaataagcttctttcctgaaccaagtcctccgctgattacataagcatgagatacctttcccatagatattgcgctctgcaaatgttctttaatagtctcatatccatatatatctgaaaaattacccatacttattcctcttttcattacttatctgtaatattataacacatattgctcctatgttgaaatatctaataacaatccccttatatcatcaatagctccaactattgcaagatgatccttttcatcttttaccagttctctggcaagattatcaagattctcatctaccatcttaacaattccatacactctgtgtcttcctcttctgtcaagaaagttctctcttgaaaacttgtgtgaacggtttacaacttcatttaggaatcccttaacaagctctctgtacttcttcatatctcttatatccatatgctttgcaatcttttcaccctgctcggtaatttcctgcatcatatttcccagtttttcctgaaggtctttctcctcaatattgctaatcagtgtaaacttaaaactatcatctgatttttcctgtgctttaaccggagtggtctgattagccggtgctatatctttaaccttaatatccatacatacctcctaatatggcactcttaacttcactaatgcaatcctctaactctccattattgctaaaccttcttgtaataccagccttagcaatattctcttctgaaaaatcctcactgtctgcaagaaatcttctgcacatttcctcatagtgtggattatcctgtttctgttctctgtggatagcccttgtgagtctcaatccatcttctacttcaatgtatatcggcataatatgctgttttccatagaattcacagaatttatcatacgcttcaagcgttcctataaccagatacctgttaccactgttaaggtcaatctgtccgtcatcagctgtaaaatacttccacacaccatacacagtattatattctctcaattcaacaatcctgccgctctcctgcatcttaacagctgtctcatcatttacaaaaaaatactcaaccccatcggtctccccggctctcattggtcttgttgtatacaatataacagtattaagcttcagactttcatcttcaattaggtttttatatatcttatccttgccggacgcgctttttcccataataaatgctatctcaggcatcttatctttccttccttaagaccgggtacttccagcccggcatttatcgcactcttaataattctgcatacatcaccggtaatccgctcgcctacattaacaacaggcattcccggtgggtatataagaaccgatgacatacttattctaccacatatatcaggtgaattaacagataaatcttcatatccattttcatccattaaatcaattgcatctgccggacacatacatacttccggcttgttgttaatcgcataccctaagctttcccctacatcattttcactgtctttgctttcaactttccagctttcatcaatctccttcaatgcactaagaaatctgtcataatactcctgtttatcagcaactgaagtcattgcaataacatatttaaatgatgccatctcaagctgaaccttatattcatccaataacctgtcatacaggtactttccatcatcacatataagaataatcttagaaatatcatcactgtccatcagccttatattattaagttttgcgatattttctcttaaattcttaagtctgtttatatattccttaaaaatataatctccctgtccttcaataattctcatacacctgtcaatactcgccataagaatatatgaggggctggttgtctgatatatattccaaaatctttccactttatcataatctacataatttccagaaatatgtagaagtgcagtctgtgtaagtgccggtaatgttttatgaatactgttaattacaatgtcagccccagcttttactgccgactctggaaattcctcactgaattcaaaatgtgccccatgtgcttcatcaactataagtggtattcctttttcatgcagataactggcaatctcccttacctctgacacaacaccttcataagtcggagaagttataataaccgcctgtgcatccctattattttcaacacattttctaatctgttccaatgaaactccactgtatattcctgtatcattatcaacctcaggtataacatatacaggctctaactgtgccataatcaatgcattatacacagatacatgacagtttcttgcaacgataatctttccttttctttttgttgcaccgcatatagctgataatattcctgctgtacttccatttacaagcatcagtgttttatctgccccatacagttttgctgccctgtcagacgcatttttaataataccatccgcattatgcatattatcaaatccgtcaatctcggtaatatcaagttctgaagtacttgcatattcagtattgcgctttcctcctggcatatgcatcggcacataaccagcttttgaatactcttcaagtttttccagaatatctatatttcccatcaatacaactccattatctcttattctgtaaccataagctttactgttacttcatcatggcttccaattgcatctgtaacttcatacttaatattataagtacctgtctggtcaaatgtatatcttccaacagtcacaatctttgcagtaatatcattaccacaagtatcagttgcagtaacccctgtcattacatctatactctgaccaatctttgtctgaatgtcctttgccccttctatcttagcactataagcattccacggattattctcgtcagggtctgtaggatcccagccggcatatgcactgtcctctggaatctttatagaatccggcttaccaagtggtccaggattaactgcatcatcgtatatagttacacctgttcccgatggacagttatcatatatccactttacatccctaacgcacattctaacgcatccaagagaagcataatcaccaagcttattgtactgtccatcctccagatcacccttattcattgaataatatggaacagaatggaacagataacctccacttattctgaatgcataacgtccataagtaccatcaaccatatatccccattcgtacttatctgatgttacataattctcacccacaatagtttcgtcgcctgcttttccacatgatgttgcaaatgctttgactggtatagtgtattctccattctcatcaattccatacactgtagcacagttagcagctctgtttaccttaataaaatatggaagataaacaccttctggcgcaatatattcttgttcttttgattcaggctctttattatcaatccacacaacttcccttgctgcagttgtctcttctgttgaaacaactgtctgttcatcattactatcatgattatcagcctgttttttcttattagaatgagacaacataattcctgccgttaatgctcctgcaatagcaatcacagcaacagcaataaaaataacaagtggcagatttctcctgaaccatgactttcttcttttcaaatatttataattaatgtttccttttgacataatatcctcctttgtttattaaaaatgtgtgtttataaatgttattaacgcaaaaaaagctgtttcatcacgaaacagctttaagtgcctagaaccggaatcgaaccagtgacacgaggattttcagtcctctgctctaccgactgagctatctaggcttagtagcggggacaggatttgaacctgtgaccttcgggttatgagcccgacgagcttccgagctgctctaccccgcggcattcactatatatattatgttaaacagatgtataatatacatcaaagtgggcggagaaggattcgaaccttcgaaggcagtgccagcagatttacagtctgtcccctttggccactcgggaatccacccatctattaaattaatattaataatgctctcacattattaatatagagccgactgtcggagtcgaaccaacaacctgctgattacaaatcagctgctctgccattgagccaagtcggcaaaattgatggggcctacagggctcgaacctgtgaccctctgcttgtaaggcagatgctctcccagctgagctaagaccccatatataattgtaagctgtttccagcaagttatcatctgggaaatgataacagcgacccggatggggttcgaacccacgacctccgccgtgacagggcggcgctctaaccagctgagccaccaggccaatcgctttcgcaattaagagataaactcttttgaaagattgctctttcaaaactgcacattaaatatatcatatcatatctgtctttgcaaatactttttcatccgattactcttaagaataactctctttgttctatccaaaccgtcttaaccttttctct

SEQ ID NO: 8507 - DNA, 143766 bp, Unknown
  gut microbiota DNA sequence
aaacgccacaataagacctataattgttaataaaatacctaaagcttttttcattggtattacctcctaaatttatctttcagttaactgattaattattctaattattatataattatataacaccattatcagataaaaatttcctatacatatcttcaactcttttcaaatcatctttatgaaaatctcctatcttaaatataaaactatcttttgtcagaagagttacttttgatactcttgcggtagatgccaatctcgacccagcttcatcccaataaataataggtatatcatatggatcttcaattttcgccttgtgttttgtaatcttaacagataatacacccaataaattttcatcaagaacaattactggtctatttaagattctgtcaggatcctcctctaatggaaattcaacagaccatacctcaccctttttcattaaatgttacatctttcttttttcatctgctcaaatatatcatcccattctgtttcatcattccattcatccgcagatgatacagttgcttttcttgtattgttataattcgtattcttcatagccagcttatacgcctgcattccatatataccactattcatatctgggtgaaatggcaacgcctgttcccttacggcctgttttgctgccattgtaaaaaatgtggtcatatccaaccctagattagacataagttcctgtaactgacttttcaatgtttcatcaattctcatagtaacatttgtatttgccattatcatcactcctttcatcttctattttattatattctttcgcatatttttatcaatgcattgttataacagtgcacatattatatcataatatgaaataacatatcaattctattcccttaaatctctcctatttttaagggaataagcaatataataagcgaatatctccttagagttctatccatgctcagttctcaatatactaatcatctatattctgtcacacaaatataatacaatctaacacctgatacctatcaatagtcgcattttacaacttcttatgggtaatttccccatcaaatcatcatattcaagccaatactgcatcaaaaaagcctataagatgttcaagcaaaacaatcttataggcttttcaactctaagtattcaatttacctgccaaaactacctatcagtcaacataaaaaatgtttcttataggaagacgacaattccacactatattttatacattagcgactgaatttcctcatgcgaaatcgccaaagctgccagatctcgccgatgcattgatgctgccatcaccaacgccgcagcaatcaagcaaactagccagcaagcccctaagacactctcgtctcacgaatcacctttctcacagccagcactttgcctgctgaaactgaaagctcatcgacacccatcttaagaaattcttctgtaagtgttgtgtctgcaccgagttcaccacagatacctgcccagataccctctgcatgtgcattctcaacaaccattcttatcatggcaagaatggctggatgatgagcatcatagaaatcatcaagctttgtattctgacggtcaatcgcaagcgtgtactgtgtcaggtcattagttccgatactgaagaaatccaccttcttagcaagctggcgactcataattacagcagccggagtctcaatcataattccactcttaggattaccgaattcaattccctgctctgtaagctcagccttaacttcattctcaataaccttaatcttatcaacttcctgttcactgattatcataggatacatgatagatatgtttccatacgcacttgctctgtaaagggcgcgtaactgtgttttgaatatctcaggtcttgtaagacatattcttattgcacgaagaccaagagcaggattatcctctttatccagtccgaaataatcacactgcttatcagcaccgatatcaagagttcttataattaccggttttccagccatgctttcagctacagtacgatatatgttgaactgttcttcttctgttggaaatgtctcagattcaagatatatgaattcacttcgaaacagtccgattcctgctgcatcattggcaataacatttgcgagatccttaatattaccaatattagaataaagcttaatcttcttgccatctaaagtcacatcttccttgcctttaagttcctgtaaaagagctttcttctcattgtctttgcgctgttcctcctgcattgctgacagagttgcctcatcaggttcaatatatacgacaccgttagttccatcgacaacgccaaacttgccattaagagattcatcaatgacaatatctgaaccaattaaagccggaattcccattgttcttgcaagaatcgcagtatgtgaattaactgaacccttctgtgtaacaaatgataatatcttgctcttatccatctggactgtctctgatggtgccagatcctctgccaccataataacaggctcatctacatctacaccgcttcctgtattgccagaaagtattcctaacagtctttctgtaatatctttgacatctgctgctcttccacgcatatattcatcgtccatggctgcaaacatctgtgaaaaattatcccctgtctgggctatggcatattctgcattcaccatctgactctcgataatatgctcaacagattccttataatcgtcatcctcaagcatcatctgatgaatctcaaatattgccgcattagcctcgccaacttcgcgaagtgctttatcatgaagttcccccagttgtttaaaggctatttctacagcttcataataacggttcttctctgcttctgcatcagtaatctttacacgcttaacctgatgttcacctttctcatacaccattatcttacctatagcaatgcctccaaatacactttttccagtatatttattcatgtgcacctcctgactgctacatattgctcttcatgaattcttcaatcttagctgctgcagcctcttcatcttcaccttctacagtaattgtaacttcatttccacattttactgcaagtgccataacaccgaagattttcttgcagtctcctgacttgccatccttagtaattgtaatcttactgctaaattccttagcagcctttacaagctctcctgctggacgagcatgtatgccttctgcatctgtaataacgtacttaaattccttcataattaaaaaccacctttcttaggctgctttcttcttaaagagccctaaacatattgttgaaatgatagttcctgccacaagtgcaatcacataatatattgcattgcctactacagggaatacgaaaatgccgccatgtggtgccattaaagtacatttgaaaaacatactgacagcacctgctgcacctgaacctatgatacatgctggtattacatgtaaaggatctgctgccgcatatggtattgcaccttctgttataaatgcaagtcccataataaagttagttggaccagcatctctttcttccttagtaaacttattcttaaaaagtattgttgcaagagcaatcgcacatggtggaaccataccacctatcattactgctgccattatatcataattacctgctgcaatggaagcagttccaaaaacatatgctgctttattgaacggaccacccatatcaattgccatcatggctgcaagtatgaatccaagaagaaccctgcttgtacttcccattcctgcaaggaagctgttaagtcctgtgttaatcccacccattacaggctctacaataaatgtcattccaagtcctattaccagaatacccactaccggatatataagtacaggtgctatcttttccaatgcctctggtaacttatcacatatctttcttaaaagaactataatatatcctgctgcaaaacctgctaccagagcgcctaagaatccagactttccattagctgcgatataaccaccaacaaaaccaagtgcaagtgccggtctgtcaccaattgccattgcaataaatcctgccagaacagggagcatgaagccaaatgctgctccaccgatagacttaaacattgccgcaacaggtgttatcgtaccaaagttgcttcgttctgcctctgacagtgcattcatatcaacattaagtccatcaataagaaatgcaattgcaatcagaatacctccgcctacaacgaaaggtaacatatgtgatacaccattcataagctgtgtatatatcttatgtccaattccgccgcctttctttgctgatgtgctttccttcttttcagaagttcctgccttatatacaggtgcatctcctgcaagagctttctttataagttcatctgctttattaattccatctgaaacctgacactcaattacattctttccatcaaatctctccattggaacctgtgcatctgccgcaacaataatacactctgctgattcaatatctgcatctgtcagtacattcttagctccgccagaacctcttgtctcaatcttaattgcacatccagccttagctgctgccttctcaagtccttctgctgccatgtaagtatgtgcaatacctgtagggcaggaagtaactgcaagaatcttagccggcttattgtcttccttttcaagtctttcatctatactcttggcttcttcgtcagccccatctatgatttcaataaattcctcagggcttccggctttcataagctttgctacgaaattctcatccataagaagcactgataacttacttaatacatcaagatgtacgttatccttagtatccggcgctgcaataaggaaaagaacctttaccggctcatcatcaagcgattcaaaatcaactccatccttaataatcattgctgcaagtcctggtgcattaacagcactgcatttgccatgaggaattgctattccttctcctacacctgttgtactttcttcttctcttgcatatactttagccctgtagctttcaatatcatcaatctttccgctctttgccataagttctacagccatatcaagagcctcactctttgtcttaggagcagcattaagattaatgcttctcttatcaagtaaatctgtaattctcataaaatacctcctttacattatctcttgcaggtaacctctacccgctttaatacctctgaaatctctctttttgttgcaagattttctgaaaatgcactggcacttcctgttgcaacgcccatccggaatgcatcttcataattacatgtctgaagatatcccgccataaatcctgcaaccattgaatcacctgcacctactgaattcttaagctcgccctttggtgcatctgcttcatatacgtttccatgttcatcaataagaactgcgccttttccacccatcgatataagcacattgacagctcccatatcctgcagcttccttgcatatggaataacctcttccttagattcaagcttaacaccaaatatatctccaagttcatgctgattaggcttgataagaaatgggtgatattcaaggacattaagtaaaagcctgcttgtcgcatcaactataatcttaacatctcttccctgtagtcttcccattattcttctgtatatatcgtctgatatacatgagggaatacttcctgcaagcacaagaacatctccacttgaaagtctgtcaatcttacttacaagagaatggagattatcttctgatatctgaggtcccattccgttaatctctgttccatctatgttcttaatcttcatgtttattcttgaaaaaccattatcaacctgaataaaatctgtattaatgccatactctgataccatgtcacatatctgttttccggtaaacccggctacaaaaccaaatgctgttgtatcaaattcaagattattaagaactattgaaacattaattcctttaccccctggaagcatatgctcatatgatgttctgttcgtcatccccagttcaaaactcttaacttccactatataatccagtgacggattaaatgttactgtatataccattgtctctcctttctggcttcacgacctttttgttataattataatacaatcacattcattcaaaatcaatcacattcattcacaaacttttagattatttttgtgcattttccacaaattatcatcaaaatactttctctaaatatgcattgtgtatcaacttcataactttcagtatcggtcaaaaacaaaaaaatatgccagaacttcagactcagccaaagttccagcatattagtattatatattattatattaatgttttcccttaagaagtggtgataatggcttatatataagcattgatatccctacatctataagacctttaactattgtaaaaggaagattaaagcatatcagacactgcatgattgatttcatagatggaattatagcctgatacaaacttaatattaccacctctggcattgccagtttataatacacaggatacactattaaataattcgagaacacactgaatacacccattgccatggcaccgcataaaccgccaagcaatgctcctgtcttagactttttcttcttataaacaattcctgctgtaaacacgaatacggaaccgagtataaagttagaaagttcgccaacaagcatactctgtgaagctgccagatgcacaacattcttaatgagacatattataatgcctgcaactggtccgagtgcataagcaccaagtaacgccggaagatccgaaaaatcaaacttgataaatcctggcataataggaatcggtatctccagatacataagaactactgctactgctgaaagcatacccgtcaccgctatcgttctcacattattcttagtattaacattactcattgcttttattctcccttatattctgtaatattattctgcctccttaaagtgcatcttttttgatgcatgctccatagcttcaacaagagttctcatatcactaagtatctgtgtagttctttcttcaccaagttcagcaataacattaccataatattctctgttattgtcctctctttttttcaagaaatcccttccggcatcagtgaatacgagatatgtaccatctgttcctttgccatcatgtttccataaagcatagcccatgtccttaagactgcttgcgattgccgatgtctgtggaattgatattctcataaatgaagacaaatccttaagatatgtcttatccttgccatcaatacaatctttctccattaccttgagcgcaatataatctgccaactcaagaccattgtaaaaattctttcttctctccttatccatcaggaacctctgaaatataagttctgtagataattcgaagctttcaaaactattgttcatgcccctatctcctctctgttttaaaataatgattcgatagatttatattatcagaaaaatccttatatgtctgtataacaatcatgaacaattattaaaaagttataaactatggattacagcattccgctgccgtatatcccgctccaataagttcttctctttcagcataagaatatatcttattcttagtccctattcttgatgccttttcgcattccggtttatgaaatgtcattgttttactgttaagaatataattgaaatccattgatgaatccttcatctgtgcagccatatctaggaattctcctgtatattcagactctcctgttgaatatatgtaattaatacccggctgtacattatataaaaatatattaaagcatattccttctccattgtcctccacagaataagcctccataagaaccccccggcacataagttcttcaccaacaaataccggagtagtcctgtacataacgtgattagaagttttctccagatatcttgcaatctttaccacatatgcattcatatagttcttcatatatggagttgctgttatataattcttcttatcagtatcagaacctccaaagcaccatgcaatgctctgcactctgctctggcaatatccatctcccgcaatactgtcatacttgatattattccatcctgtaggacagatactttttgattcacctttcttatcatcttcagatggcattgaatcataatctaaacatgccattgcagaagtaacccttttgatactgtcaagcggtccatattttatatatgaatccttaactatctcagagcttgtaaaatatggcttattatcattaactacaacatatggattatctccattatatgccggaatatcctcataggaaaactgtatactgtttgaattaacattattagcagacacatttgcaaaaagtttatatccgccaaacacaatcaatacaagtaatattatcccaattattttctttctcatttcgtatcacccttcttcattcctggtatctgtgccagaataaccgctgtaaacacaagtacacaccccattatctcttttggttttaacaattccccaagtacaatccatccggcaagcaccgcaaacactgattcaaggctcatgacaatagatgccaccgaaggctgtgcatatttctgtccaaccatctgaagagtatatgctatgccgcttgagaatacacctgcataaagtatcggaacaagcgcagctttaattcctgcaaatgtaacattttccttaaatatcatagcaaatgttgaaataattgcaataacaataaattgtatacaggacattttcatactgtcagcacttgaaaatttatcaataacaagaatgtgtattgtaaagcatattgctcccataaacacaaggacatcaccaaggtatattcctgatacaccgccagacatacataaaagatacattccggcaacacatcctgtaacagaaactcctattatccagtgcattttcttacccataaaaaccgaaactaccgaaaccataacaacataagttgctgtaataaagcctgaccttcctgatgccgcgaccccttgtggatatacacttattccatactgctggaaagtcattgctgcaaaaagaacaattccgcatattatgcccgcacccagtggccatgtctgtaaacgactgttattctctgtattaattacttttccagaattatttcttttatccaacacatttttaattacaattacaactgccagaaacagtgcacccactatagaccttgcagcattaaatgtaaatgtcccaactgctcctgcaccacttgtctgtgcaacaaatgccgtcccccagataaatgcagcaagaagcagtatcaggcttccctttatattattcattactcttacccttattaatatatttgatacctgtaaatgcacctataagaataactaaacctataataagaggaacaacaggattctgtacaaatcctgcaataacatatgtcacacaagaaataactgcaactacaattacatatggaagctgtgtagacacatgattcatatgattacactgtgctcctgccgaagccataattgtcgtgtcagatattggtgaacaatggtctccacagacagctccagccatacatgctgagattgatataatcatcattgtatggttcgttcctgaaaatgtatttacaacaataggaataagaattccaaatgttccccacgatgttcctgttgcaaaagcaaggaataccgcaaccagaaatataactgccggcagaatacttaaccatccgcccgatactccttttacaagtccggcaacaaactccttagcgcccagactgtctgtcattgctttgagtgtccatgcaaatgtaagaataaggattgctggtaccattgccttgaatccttccggtatgcatgagcatgattcattgaatgaaagtacccttcttactgcatagaacacaattgttattataagtgcaaagaaacttccaagcataagccctaccgaagcatcacttcctgaaaatgcatcaacaaaacctactcccttgaaaaaatctcctgaatatagcattccaattatgcagcaaactataagtgtaataattggaaacagcagatctaacacttttccgcgtcccttaattacatcttctgttgcgttagcatatggcctgtcaggagttgtatacaagtctcccttagctgcatttgcttcatgaactgccattgaaccaaagtcaacctttaacgctacaataagaatcattgctgcaatagtaaataacgcataataattgtaaggaatagccttaataaatattccaaaaccatcttcgccctcaacaaaacctgttaccgctgctgcccatgaagatataggcgcaataatacagattggtgccgctgttgcatcaataagatatgcaagctttgctctcgaaacattatgcttgtctgttactggacgcataacgcttccaacagtaagacagttaaaataatcatcaataaatataagaattccaagaagcaccgtaacaagctgtgctccaactcttgtcttaatatgtcttccagcccattctccaaatgctgcagaaccacctgctttattcatcatgcacaccatgattcccagtacaacaaggaacaccagaattcctacattgtaaggatctgacaatactcctacaagaccatcttcaaatatatgaagaactgatttttcaaaactgaacccgctctggaatatatttccatagaacagtcctcctattacaattcctacaaaaagtgaactgtaaacctctttggtaattaacgctaatatgatagcaaccagcggtggtataagtgcccagaaggttgcatacagattaggtacatactgaataacttcttccattgtatctctccttaataaatgtatatcctacactaattgtgtattctgctttcactgcaagtaaaatatataacctgataattctttgcaatctcgtcgagaagcttcatagcccccttaatattattatcatcaagattgacaaatgggtcatcaaatataagaaatggtttctcttctttatacattgcctcgacaagcgccattcgcatgcatactccaaccagatcctgctttcctgcactaagatatccaatatctcttggcatattctgctccatgacagtaagctttgtatctgcatcaagattgtatgcatcaggctcacatccggtaagtatagtataatacttcctaaagcccgacataacaggtcccatatattcagaagtaaaagactgctttgaatcctccataatctgttttgtaagcttcagcaatctctctttattcttttcgctttcctgaatatctgtaagctggttaagttcctgcctgcagctttcacactcatcagcctgaatctgaagattctctaactgcttattgcactgggatatctgttgtgcatattcttcaatcatgttgtcaatccgtgtcatatctgacgctatatcttccagtgaaatcttatcaacttcattttgtgcagtgaacatactgatatcattctctgactcaaaatcagctttaatcatcattgcattatcatactcacttttagcacgataatatccatcaagctttttgtcaaggtttctaagtgtttctccaatactttcctcactcttaaagcctttaatatattttctcagaaagcatttaatacctgacatattctgctcatactggtttctatagatatcttgtttagacatttcttgattaattcttttatagtccgctatgtcatttcttatacgttcaattgccagactataattattaccattagcggcacagttataccgtttcagaaatacatccagcctgttctcaagctgttttatctgttcagataattcgttgtcctgaccagccgcccgtttctcaagttcacgataatcttctatatcatgacataaacccgaaagctcccatgcaatattatctctgctaaatgtaatctcatattcttcacagaactgctttacaacattctccgttccgctgataaaattcttatcatcattaatatccgcttcaattgccttaagcttattatcagattcagcacttatattcataaattcactatcatgctgtttcttcttcacagttcctatcactgaaaatactactgccatacacaagccgacaataatcatggcaattccaacttccattacaggcacaacaagcacaccgcctattacagccattacgattcctgctataattccaggcacacatgaatttttatataacttagctctttcaagtcttgcttgttcattctctcttgcaagatccagcttcatttccttgccaacaatagaattctgcttgttctgtgctgaaatccagatatcatgaatcttcccgactttgttttcatcgggaattcctcttgcaaaccttttcttataccattcaagcttttccagttcatcgtcagacaaacggttcttcgcagcagcttctttaagttcatctaattgtccggcagtattctgccattcatcaatagtttcactatcaggaaccccctgttcaaacatacctctaagttgttcaagcctttcactgtcatcatcatcaatgtgtgtgaattttccacttaatcttcctgcttcatcaaagatttcaatctgcttatgcacatcttccttttcaggcagttccccattaaagtaatgttcatattgttcaaatgcattcttcttatcattacattccttatcaagcagctgatacttctctttcaatgcctgtatatccttctgcacacttaaatgcttctgctgttcctgcattttctttctgtcagctttaagctcttctctcttagcacacagattatctcttatatctgtctgctcttcaataattctgtctgtctgtgaataattgttaattctggcagcaagctctgttattcttgattttctcttagatatagatcctgtagacctcgtacttgttatattattaagcaccgcggtcagtcttcccacagcagtttcaaaattattaatatcatctgtattatctgcaagatttccaatcttagcatttatgctgtcagtagttgccgtaacacaatcactctgacctataaacacagttctctcaaaagactgtgcatctatcttgaacaattcttctccaatatcacacgaaaaatcatcacattcaacattagtgtcttttcttacaagcaggaattcatcatccgcctgctttttcccaaaggttcttctaagtgaataaaccactccaccagtttcaaatactatctcaccaccataaacacccttctgccacggcataagacgatttctttccttatcgactaatttcttcttgctttcattcttaaatccataaaacataacacggataaaggatgcaagtgtactctttccccagccattatcctcacatatcgtattacattcaccagagaaatcatatgtaacattattcagttttccaaaattttcgattgtacaactgataagtttcatcagactatctcctccccctgcaatgcctgtaatccatatcgtataattacagctttatcttgttcattgatatcgtctctccccataacatttctaataaactctcccttaagtgaaacatcatgctcataagacatataatcaaccctataagcggtgcagtcctttatcttaaatgcataaaacctgttctcaaactgcttacacagatagtccgtatctttctcacattcaacatccaattcacctgtgagttcaagcttaaccagactatctttcgtaaaacctgcattgttaagaaaactgcttaatttctgttcaatttcaaatgtgctttcacaccctgtaacatcaacctgtgcaacataaatatttcttcttgcaaatggaacaaaatatgtatcataacttccagaagtttcatcaatatcaagcactacaaagccatgctctccagcctcatcaaagccccttccctcaagacatcccggataacaatacactcctctggcatccagcctgtcacttgaatattcatgcacatgtccaagtgcaagataatcaattccacggtttcttaaatccttaagacttattatctgtgcgttattcttagaaacatgagaagcctcctgcccatgcagtacaacaatattataattgcctgcattgagagaaaggcttccatatatcttacccgcattatcactgtcaagttccacgccggtaataacaatatcctttgtaatactgccattattgattataccggcgttataacttgtccattcttttccaaacatacgaagattagcaggaatctcatccagatacgacacaaagcttccattgtcatgattaccctgcagataataaaatgtaatactcggattattaattattatattatatacttctttctttgctccgactgatatgttccttgtatcaaacaaatcccccgcaattataataaccccgatacactccttcacagcatatccaaccatatccttaaaagatgccagcagctcactcctgcgttctcttgccttatctttatcaagattagccgtcatcgctgaatccagatgaatatctgcacaatgcaaaatcttcatatcttctcaacctcaacaaatatatactaattaatatgtagaatacgctccttcaacatgaacactctctgttgtttcattctggatatatattctgtatgatccgctcattgtcagctcaaatacgtgtgaatcattgccattggcaataatatatcttttcgaaccatcaggctgtataattcctgctctgacactatgaaatggttccaccgaaaaaacacttaaaactatcctctgtccagaagatgcatgaaagcttgatgttgacctccttaccccggcatacacatcccatgagattgtaccatttgaagcgcatggcattatttcatcaggattaacatcttcttcatacatgtctgtaacagctgaatcttcataatcagcagcctcataatattctgttcctgatacctgtagctctcttttttcatcagcagttacctccgcaaccgtaactgatgtttcagttacggttgtagctgctcccgccaccataacagaactcatagcaacaaataaagtcagtatagctgctgcaacagccattggtcttttcttaacattataactcttcataacatgctccattctttctcttaaactgtttttattttcatacagacttgcagacagcatgtcataaagattattatttctcacagcaagattaaatattgtttcataatattcatgtagtccattctctgacatacatacagaatagtcacatgcatactcagcatatttaataaatcttctgtaaaaaatccatataaccggattaaagaaattaagtatacttgccaccgcaagaagatatctgaaccatatatcattatgaaccacatgtgtaagttcatgtgcaaatacaactctcatctctttctcagaaaaatgatctgcattaacaataacacacggtctgtgtattcctgtcacatatgcagtagttgttctgtatgactgccttaatgtaattttacatttcccaagtcccatctgttcttttatctcatagaaaatcctgttcatctccttattacaggcaaatgattctttccttattgataaaattctgaatctcttaaacacataaatcattattgcaacagccagacctgttatccacacaatagcaacagctcttgtcacattaataataagcggtgatgtatcaaatgcgtaaccattccacacgaaccttaagcggtcaatcattcttatcgcgtaatacattaccggaattatccagaacaatacaacaacttttccaagtctgtatgacatattaagatatcctgtcttatcaagtaaatatgaagttataagccatgcaacagtaagtacgctacccgtaaatgtagttatgacaatcatgtaaaataaatctgtccatagcataatctgctgcactcctaagttaaatatattaatccgacatataaataaatatatcacatttttatataaaaacatagaacttctttgtataaaatggtatacttaattcatatttattgttcgtattaatcatatacacagaagggagtatttatgcaatataatgtcaaaaaatgggggcttctccccgatggtacaatgtgtcatattattcagctttcatataatgacatatcgctttatgtttcagactatggtgcaacatttcagtcaatgttcgtgactgattcatccggcacacaacacgacataatccttggttatgataccccggaagaatattattatgaccagcagaacttcggtgggacaatgggacgatttgctaacagaattgcaggggcatgcataactcttaatggcaaagactggcatcttcctgccaacgaaggtaataacactcttcacagcggacacggcttcaacaaatgtatgtggcagtatgatgttaatcctgaggctctcattctcacactttacagcccgcatcttgagaatggattccctggaaatcttaaagtcacccagacaattactattactgacaggaattcaatacttgtgcattatgacgcagtgtcagatatggatacggtatgtaacttcaccaatcatagttactttaatttttccggggtaaagaacgtctgtaattatatagtatctgtaggagcagattactatacaccggtagacagcagcaatatccctacaggtgatattctgcctgttgaaggaacaatgtatgatttccgtagtccggtaaaagttggaacggattgtattgatatcaattatgttctatctgatgcatatgaatacgccgctaaagtaaccgaccccgaagcaggcataagtatgtctgtaaagaccagtttcccaggattacagctgtataacggtaattatataggtaactgtaccggtaaatacaatttgccatacaacaatcaacatggcatatgttttgaacctcagttttttcctgactcaatgcatcataataattttccatccccagttcttaaagccggagaacatcttgacagatacatagaatatattttctaaatagcagccatatcactaaagtgcatgatacaagattaaaaaagaaccgcccttgaaatcaggacggttcttttttaatctaaaagcatatctaacctttaacaccaccaagtgtaacacctcttacaatgaactttgaaagacagatatatactataattaccggaacaatagcaaatgctatcatcatatatacctgacccatatcaaacttcaggaaatccgcactacgaagctgtgctatcaacagaggaagggttttcttacttgccttgttaataaggagtgaaggtataaaataattattccatgatgatacgaaagtaaatatcatctgaacagccagagccggcttcataagaggcagaacaatctggttaaatattctgaactctctcgcaccatcaattctcgctgcctcaataagttccattggaagcacactgtccatatactgcttaataaagaagaatactacaggtgctgcaactgaaggtacaataagcggtatgtaagaattaagaagattccagtctcccatcatcttaacaaatccaagtgctgatacctgtgttggtaccatcattacaagaagaatgaatgtaaatgcaaacttctttaacctgaagttatatgcatgaatagcaaatgctgtaagtgctgagaaatacactgacagaactgctgaacatgccgcaacaaacaaactgttaaacataccctttataacaggaatattctcattagcaagaacattcttcatgttgactataaacgactttcccggaaggaacgagaatcctttctggatatcagggtgtgatctcgttgtattaataataagtacatagaatgagaaaaggcacaaaaatgttataagaataagtacgatataacatagcactctctctgttgtaagtattatcctgtctttcactccagcattagtgcctttaatatcagcacttgcagaggctttacctgaattactcatattacttcgcctcctttgcttttttcttcttagcttttctgattcctgctgcttccatatcctttgttatataattaaatacaaatatactaagtactgctgttacaataaacagaataactgaaagcgcacctgccataccataattcttactataaagatgcttattaagatacatgataaccgtcatacttgttctatccggattaccattaccattagtaagaatctgaggaacatcaaacatctggataccaccaatcaatgatgtaataagtgtgtatgccagaataggcttaataagcggaagtgtaatctttccaaatatctgtctggaattagcaccatcaattcttgctgcttcaaaaagacaagggtcaacacccatgatggcagccataagaataattgttgtattaccaaaccacataaggaagttcataagagcaatcagtcctctcgctcctgctacctccgcaaggaatctatatgtaggcaatcccatactgttaagcatgttattgattggtccctgatctgcaaatattgcgtagaataacatggcaaatgcagatgccataattaaattaggcatatagattatagttttgaaaaatcctgtacattttaatcttaatctaagatctgtaaaccatgacgccagaagcaatgatataagaatctggggaataaatcccatcagccacattatcattgtattcttcagatagagcaatgtatcaccgttaaacagtatggccttgtaattgtcaaatccaacgaacttaggtccgacctgcataagtccaaccatatagttctcaaaaaaactattataaaatgtagatatcagtggtattaatgaaaacacaatatatactgcaaagaacggtataagaaatatgtatccccattttgcatagcttacaaactttttcttctttttattcatacatatctccattcctgccatataaaaaggcacagccatataacatacttattataatgactgtgccttaatgactagcaattactaattactttgaaaggtttggatatttctcaatagctgctttatagaagttatcaagagccttatccttagttacattgccatcgaagtaatccttcatagccttctggaattcttcgttaagaccctggtcataagaagaaatattcttcatgctgatcttaggagctgacttagcaaataacttgatatgattctgaccaccaaggaaatctgacttgaagttactgctagcgatttcattcatacctgatgttgtattagtgtaatcctgagtatcttctgtaatcttcttcattgtagccttatcacagcaaagtgtcttcataacatcttttacaaggttagcgttatctgttcctgctgctgcacagatccatgtaccaccccagtagtagctctgtggaccttcacatactgcatagtcgccgtagataccgttaccaacttcttccttaccaccttccttaacaggagtagcaagtgagttacctaaaagtgtaaagttaattccccatgttgagtagaagaatccgaataccttaccagaaggtccctgatctgctgcccatgttgaatcccaaagagatgacttattattatagcccttatctgtatatttcttagtctgatcaacccacttcataatgttatcatcaataacaatcttgttattagaatcaacccaaggacctgatacattgttagagaatactctgtatgaatcatcataacctgaaagcatcttgtaacccttagcagcagcctgttcagctaccttatcaaacttatcccaggttgaaagtgcttcctgaaccttatccggatcatctgttccaagaacatccttagcaatagaacgtctgtaagcaaagagtcccggagtagcctgccatgttgtagccttaagttttcctttgctgtcagttgcaatatcctttgtgtactgatacatatccttaaggtcatcatctgtaaggcctacatcttttacatcaagtgtgtaatcactattaacatactttaaagcataatcagcttcgataaggaacatatcaatcttatcatctgctgctgcatccttctgctttaataatgcagcatcaagagcattctgataagcgttgttttcgttaggagtaattacccagtttaccttaacatctgaaggaacattcttataatatccttcaaatctgctcttaaactcttcgttccagcagtaaatgttaagtaccttaccctgttcctcaggcttagtattaactgttgccgaaccaccatcctttgatccacaacctgctaatgtggaaagcaccatcattgtaccaagtgccagacttaataatctctttttcataaaaaaccctccataaatcttagacgacacctttagtttcctatctttcttattgtttccccttcgattagttccgcatctacaacaaccctctttactatcgttgccctgggattctctatagcacttataagctcatctgcggcaatcctgccgatttccctggtattctgacaaattgttgtaatcttaggatttaacatctgcgagaatcttgttccatcgtaacctgcaacagacacatccttcggactatgcaatttcatattcttaatagcattctttcctccaaccacagataaatcatccggataaaaaatacatgttggcggttcctttaattttaacagctcatatgtaagcttctcagcttttattgaatcaagataggttgattctttaatgtattcatctggaacttctacccctaattcatccattgtcttataaaaggctgccagacgctctttcgtaacctctgattcaacatttccataaatataagctatctttctgtgtcccctgctgtacgcgtaacgtactaattcactcatccctttcacgttgttagaattgaccgatgtactgccattgaaaatgtagtcgatggtcacaactggtaatctcccgttaaccatttcatagatttcaggattgctgaaatcctcacaagctacaagcacgccatcaaaatttctgtataaacagtgttcgtagaaagtcatcttcttagagtgattgcttacaaatgtaatatcataccccttcttctctgcttcattcttaaaactctcaagaacctcggcgaaatactcatgtgcaagaccattattaagaagaactcctatgttatatgaacggttcgtcttaagtgctctggctgctgaattcggataatatccaagtctgttagctgcctctttaactttcctgcgtgtctcttcactgatgtcactatggtcattgagagctttacttactgtagcaattgaaacaccacattctacagcaacatctttcatagataccatagattcattcctttcatgcattacttaatcgttttcgtagctttactataactcatatcagatataaatgcaagtacttttataaattttacttatttttctatatatcatcgtattttttgtgcatttctaccaattcttgctcaaatccaaaataatcattgatttaatccaagccttaaaatatacttattactataaaatcaatattagaacttgtaccttaatgcacttaatcgttttctataaattatatgtgtacaggaggtataatatgcaattcggtttttttgatgacatcaataaagaatatgtcataaccacaccagaaactccattgccatggattaattacttaggctgtgagaattttttcagtcttaagagcaatactggcggaggatactgtttctataaggatgccaagctgctccgactcacaagatatcgctataataattctcctttagataacaacggccactacatttatattaaagatgaggataccatatggaatcctggatggcagccatcccagacaccagttgaggattatacatgtcgtcacggacttggatatacagttatttcttcatctaagaatgacatcaaggctacacagactgctcttgttcctatcggagataattgcgagcttgataaacttactattaagaacacaggaaatgctgctaaacatttatctgtatattcttatatagaattctgtttatggaatgcagttgatgactgcaacaacttccagcgtaacttcagcacaggcgaagttgaagttcagccggagattaatattggcaccgctgccatgtcagcaatatatcacaagacagaataccgtgaacggcgtaaccattatgctgttcatgccgtcagcactgctgccagcggtttcgatacaagcagagaaagtttcataggtacatacggaagtcctgcaatgcctaaagctgttaaagaaggtacatcttataattctattgcaagcggatggtcacctgttggatctttcagaatcgatatcgaccttgagccgggcgaagagaaagaatatgtattcattataggatatgcagagaaccctgatgataagaagtgggaatcattcggaatcattaataaagaacctgcatatgcccttcttgaaaaatacaacactccggcaaaatttgatacagctcttgctgctttaaaagattactggactcatcttctctcgtcttatattattgacacagaagacaagaagctctgccgtatggttaatatatggaaccagtatcagtgcatggtaacatttaacatgtcaagatccgcttcttattatgaatctggaaccggacgcggtatgggatttagagattcctgccaggatttacttggcttcgtacatcttattcctgattcagcaagacagagaattcttgatattgctgctacacagtttgaggacggaagtgcttatcatcagtatcagccattaactaagaaaggtaattctgatattggttctggctttaatgatgatcctttatggcttattgcaggaacagctgcatatcttaaagaaacaggcgatttcagcattcttgatgaaaatgtagcatttgactgcgatgcaggtaaggctcagccgcttatggaacatttaagaagatcctttaattatacaactactcatcttggaccgcataagctgccacttatcggaagagctgactggaatgactgtctcaacttaaactgcttctcttctgctccgggtgaatctttccagactaccggaccatcagaaggacctgttgctgaatcggtatttatcgctggaatgtatgtaaaatatggcaatgaatatgcagacatatgccacatatcaggtcttacagaggaagaaaacgctgtacgttcccatgttgatgacatgtataaagctgttcttgatgcaggctgggatggtgaatggttccttcgtgcatatgatgctgaaagccgtaaggttggttcacatgaatgtgaagatggacagatatacattgaaccacagggcttctgtgttatggcaggtataggtgtcaaagaaggactcgcacagaaagctatggattcagtagaaaaaattcttgataccaagtatggaatcatgattttacaaccagcttacaggtcatatcatcttgaacttggcgaggtatcttcttatccgcctggatacaaagaaaatgccggaatattctgtcataataatccgtgggtatctattgctgaaaccgttgttgatgataaaaacagagcattcgaaacatacaagaaaatatgtccggcataccttgaagaaataagtgagatacacaggactgaaccttatgtatattcacagatgattgccggcaaagatgcagcaagatttggtgaagccaaaaacagctggcttacaggcaccgctgcatggacatttacaagtatatctcaatatatacttggtgtaagagcttcatttgaaggactcaccattgacccttgtctgccggattctattaagaatctgacaattacaagaaaattcagagatgctgtctataacattaccatcaataacaataagcacgaaagagtttcttctcttattgtcaatggtaatgaaattacaggaaacacagtgcctttcaatgctgacactaaagaattcaatgtaattgttaatatctgatatttaaggagaataattatgtttgataagaactttttatggggaactgcctcaagttcatatcagatagagggagcctttaccgaagacggcaaaggcgtttctatctgggatacattttctaataagccaggaaatatcgcacacaacgagaatggtaacgaagcctgtgaccactatcaccgctatcgcgaggatattgcacttatgaaaaatcttggtattcaggcataccgcttttcaatttcatggacacgaatatttcctgatggaattgttaaggattctgacggcaatgtgcatttcaacaaagccggacttgacttctacgataatattgtaaactgttgtcttgaaaatggtattgagccttttataacactctatcactgggatctgccacaggcacttgaagataatggcggatggctgaacagacagacagcttatatatttgctgactatgcagaatttatatgtgagcatttttctgacagagtcgttaatatcgcaactatcaatgaaccacagataatctcaggtcttggatatatgaatggacttcatgctcccggaaagaaactggactgcatcagcgtgctgtcagtcatacaccatcttgcacttgcacacggtcttgctgttgccaagatgcgtgccattgcaaagcagccaataaagactggtttttcaagcactggcgacttgtgttttcctgcaagtgaatgtgatgaagatattgatgctgcaagagctgaaagtttcaagattgttaccggaaacatgacatttaaccacactatattctgcgatatgacatgccttggcaggtaccctgatattgcaggcacaggattacatcttgaaaaaggtcttgaaaaaatcggacattataaagaactcccattcgttaaagacggggattcagaactgatgcaccagcctatagatttcttaggaatcaacgtatataacggtcacgaggtaagtgccacaggacatataaagaaaaaacctggaagtccacgaacagctcttggctggcctgtaactcccggtgttatgaattatggtataagatacatgtatgagcggtataatcttccaatatatatatttgaggatggacttgcctgcaacgatatcataagtcttgatggcaaagtccacgacagcaaccgtatcgactttctgacaagatatctcacagaccttgagaaagcgtataaaaccggcgttccgatactcggctacttccactggtcattcacagataatttcgaatggcacagcggctacgacccaagattcgggttagtgttcgtagactatgaaacacaacagagaattccaaaggattctgcgtactggtattccgatttaatcaggcagtcatgcaactaaatattgcattaataagagtgtctaactgccgttgtgtctctctatggtgcatgttcgatttattccgaatcgtgtgtgagttaatgccgctatctataaaagttcaatgctggaaatctcgttcaagcgaagcgcgtttgatttccagcactgtaataaactctatagatggcggcatttactcacactagatgcaggaatccatgagaacatgtatcatagatagatgcaacggtagttagacgcccttaggattaatacaattttttaattaattcttacggttattaaagtacacaaaattatcaattgcatcgaatatatcatcgaaattctcccttggtgctgcgtctatgtacgctcttaatattgcattttctttctcgcccttgtaacgtccgtagaatatgtcatacagattgtgtcctctgacatattttctgatattctccatgttgtctatgatgtcctgtcttgtctcaattgttatgttcagtttttctaacattttcttagtgctgacaaggcggtacaggtattctttatatttggcatataatatatcatagaactggtctacactttttataacgcctatcttagtcattatctcagggtcaagaaaataattctcaaatgaataatattttaatataagcacattacggtctgttactcttggcagattgccataatcctgctttgcacgctgcttatagtaattggtaagctggtctcttaaatggtcagcatccttaccatctccatctcttatcataaggaactcatccttaagatataatgtatttatatatttcagattggcataagtcttgatgttggtacaactgttagttgcaattattgctatacgattgagattgccattctcatctataacttctgaataatatttctccagaagtagcggcagacggcttctgtcctgttttccttccactataaatacaaagctcacattcataaggtcattggcagcatacccaagatcatctaatatatcatctatatccgcctccggagtagcaactgtattattatctttatcgttaatcacctgacgaatctgtcttgtagtaaagttaaataacatttgcggtgaatgcgtgcagaatataacctgattctttcttgaaagcttgtacagaatttcacttgctatcttctgtaactgaggatgaagatatatttccggatcttcaatcagaataatgtatggcacagtacttccatattccgcataggtttcaagcagtgacaaaatgtagatactgttcagtccatcagaaaggtcattgacatccccatcaatgtcacgcatttcattgtgaacaattgtatcaacatgcatgagtttttctgcatcaaatgtaatctgataatgaattctttctccaatgccaccattgttcttaaatttttcattaagtttgttctcaaaattagcaagattaaaattaaacagcttatactgcataagtctcgctgtttctaataaagataactgttccggtttcttgcggttaataattcctatgcaattaaagcactgattacacatcttatgcttatcaaatatacacacgttatctttaaggtctgcatattcagttccaccctgcagcatgataagatcttcctgaattgatgacttacgtctttcgtggtcaacatagaatattctgggaaggactgtttttatataaatattgttcttcttaattccgtccctgtacttaatcttaccatcacggctatatacatattcaaattcaagaataccatcctttaacgatggaagtttattgcaaaaatccttataccacaagtcataatgcttaaaagaactgacctgtcccttctgatacaatacagccagctcctcatcttcaatactgatgcgaactgtaatgcttatattaccttcgttatcattgaaatctcttaatgaaacttcataatccccggtaaccgctcttattgcgtcaagaaccacactctttcctgcattatttctgccaacaagaatcagtacatcttcaatatcattaatctcaagttctctgattgatttaaaatttctgattaaaagatattctatcctcatacctgtcctctgccccctgatacatttctgccagcatatattctggtgtattatcattaaatgttgatattcctttacccgtattaggattctttttggaatataccatatccacaatgaatgcaactatcaatgccgcacacactgcaccaacaaccctcagtttaatctttctgaagaaattatcaagaagcggtgcaataatatatacgattgcaactcctccaagtccaaatactaaaagaccttcagcacatattcttccattaaggttaagaaaatacccgttataattccaccatcttcttccgcagctgatttccagatacagcgatgtaaaatattcaacaaatccgcataaaactactgatgcaaagaattccacaacaggcttatttcttaattttttaagacatatcagtatgagtatcccacctgaaccatatataggaagccatggtccatgaagaacacctctgtttacaaatgtatgtgacgatatcagatgaaacgtaacctcccatatccatcccacaaaacataatgaaaagaatatcagtataagcgatggtattgaataattacgcatatacactgtattttcaaggtcaactctgtgttccttaagattgaaaagacgggcaggataggcttttccaactgcttctgctttattcttactcatacgaagcatttccttctttttttcttcaaattccagctctgccttgctgttaataagtattatgccaaatgtgttggctaaaaatactcttaatttcttcaatcttcctattctcgaattgtggtaatcatcaaaatcaatctgtggctgtgggctgtctataagtttaaatacatctgcatatacatttttaagcagctcttctgatggtctttcatacagatatgaatcattaagccactgaaccgcctccggttctttttcaagatatactgctcttacatttgcatagaattctgcataaaatgcagctttataaggattcacaaacagcactcctacaactcctaacgttgccattccaatcactgtccagccaatgaatgataatccatacagaaatgccctccatttgtagcctttcatcatctttcttgataaggttatagcctcatttgccttcatatcaggattctccgcgataatgtatggcacaagcatgtatgaaaaatgcttcacaaatatacccacaattgtaagtgaccataatatttcatatacattattgacaataagcacccacgatgccttcatccacctttttacgcggagaagaaacatgaactttccaggtggaacagtatcatatgtgcgcgtttcaagcactattcttcttgatataacaagataagttttcttgataaaaaatgttataaacacatataccataagtgccgctataagaagtataagcactactgctcttcttgaacttatgactgatgatagtgaatccacaaatgtaaacacaattcctccagatgttatgccattaactattgatgcaaatacacctcttgttcttcccaataccttggttgcattgtctttggcctcagaaaccttcgcatcagactgcgtccttccaaaatcatcgtcacccgtgattactgcgcccattgcctgaaccacagaacttacaaccgaactgttagcgacagtatcaacatttgcttcaaccgatgctgctccctgaatttcattgttaactgttcctaaacttttaaaggcttccatcgtctctgtatattcagagccaatgaaagccgcaaaaaggcagactgctactaacagccagtaatgtttttttaagttcttcttagcatttttagcaagttcttttctcttaaaatccatatcccaacaatcttctttacttattaagtacagtcttgcgtactactccaagcggatctttaaccataagtatgacaatccatatgataagtccaaaagctaccactgataaacccaaaaatgcgtcattaagcatatctgatgatgccggagtaaaatactctgcccccagttcaatatattccacaactgcatctaccatccacataagtgatgcaccccagtacataagcgcaagtgttccaagttttaactgcgaacgcctgtcattagtataccatatgatagtagttataaccgctgcaaatacagctataagtaatgtcataattatctctccaatcctttaacttctgcttccttagctgctttcttttctactccggaagctattgcaaccatgccgacccacacagctgtaacaaccactgccatgccaacaccggcagttgccatctctttaagcatctgcacagcatcctgagcgttgcctgctgctgttaagaatggaaagaaaggagtaacttctccatgccatacatgctcgaatgcaagtaaagctgttcctccccaaagcatattattaagccatcttagctttcttgaaaatggaagcaccttttcttccttaactgcttctacagctccttctgtctcgcacgaacatatttccttcttctctttcttttcaacaatcttagttatcgctgttgtaacgatagcttcagtacctggtactataaaacatgccatattaaattcctcctgattcacgatgcattttcatgttccaaaatgcatatatttatatgtattttacctatttcacattagattgtcaaacattgtaaaatatacattttcacatatattttctctttattccctctgctgaatatgatatagtaaagcagatgggattcactttggaaaggagatgttcttatgaagaaaagctttaaaagactgttaagctgcatatttgtaataacatttttccttattggcatgtgcctcgacagggctcgtgtgaatattcctgaagtggactctttttctgtatcagaagctaaggtattcgctacaccaaaagcctctgtcagtgataccatgccatgtacaactgaaatgcttggacttgtgagaacatcaatcaccaatcttacagcagacagaagcagttcccgcaatgtattacgcatattccaattcttactttgcggtctgtgtgcagctatcggtatcagtatctatttcaaatcgacaggcgtaatgcatgattctatcacatgcagcaccactgtcactcttaattatatccaccagactgacggcaaaaaataacagattatcattaaatcagaacattttctggtaatacattatttttatatattatcagtaatattaaacaactatgtgaagaggcaataaatatgaatattttaatgataatcggtattattctgggtggaggtgtatctgttgcatccaccgttggaataactgtaggtattttcgggaccattgtatataaattttacagaaagcttcgtttcggaatatctatgtttgactaagtttgaaaggatgaataataatatgttaggtaatataacagtcggtatcgtcattgttcttgctgttgctgcctgtggacttggtgtgtggcttgacagagccaagtcagacagtcaggacaacaacactgacgcacaatctaagaattaaatgataaaggcggtcacatcagattctattctgatatgaccgcttttcttaccacttttacttgctttcatggtagctgttaagcaaatcttcaattctcatattaatattttcaggaaatgttgcatcatttccgattttaacccacaaatcaatgttcttatatttcttctctcccattgtattatgtctgtcctgcttcgaagatacttctatctttaccattgcacgcttctgctcaagtatcggaataagcacataatataatctgtcatctttaaatgatatgtatcccgcttcttttcccgaacgagtcattaaatacagtctatgcttttttattcctgccggaaacagcttcattccagctttgataaatctagattcaggtgacatttcaagcattgctccgacataaaatacatttgcagcatcatcaattgatgtaagaatatttcccaatgtatctgatgttgcagtaaactgctgtgctaacagatatgcaagttctgcctgatatatgattttgtattctgaatcatgcactcttcctgtttcttcatcaattctgttaagaagttcctcactacattcatatatactgcgcagaaacaacttaaaatcctcatctggcatccacatatatctgcctcgtgcaaccttaaatcttccaatgttgttgccattgtaatcttcagcataatgatacacattgcgttggcaaaaggcatgttcattctctggagctgtaaaatcatattcttcattttcctgatcagtgccataatatttctcatcatattcggaatatttataatcatatttatagttactcttcaatgattcctgtccagtctgattgaaaagaactgtatatgcttcgttaatttcatatgcgctgtatttgtatacattttctctgtttaatgcagcatccggatgcaccatatgcataagccgtctgtaccgcttctttaattcagtcttagttatatcagatttgacatcaaatattttatatgcctgctgaaccgtcataaatgttatattccttctacatttttctttttggttatcatacaccaattaatgattttttgctaactttattattgacagttatattgttatagtgtactagtacacaagtacgcatcatgtgtatgttattatcaaggaggttaatccctctccttaccatgaggaaatgtgctttgaaaagcacattggattttccttcggaaaacaaggagggattatggactataaggctaatataccaatttatcttcaggtaattgatgatatcaaaaagagaattcttaccggtgagattaagcttggcgacaagcttccataaaccagggaacttgccgtacagtacacggtcaatcctaacactgctgcaaggatatacaatgaacttgaacagtgcggtctatgctacaccaaaagaggtcttggcacatttgtatcagaggatataaatctgattgatacattaaaggcagagatttccaatgaaatgattgagactttcgtttcaggaatgacaagccttggcttttctaaagaggagattattaatctcattaacaattatcatgaataagatatggagggatttaattatgctgcaatgtaataatgttactaaaaagtatatgaagatgactgccgttaatggtgtttccattgacttcatgccgggcagaatatacgccctgctcggctctaacggaagcggcaaaacaactttaatgaagatgatagcaggtctggtaaaacctacttccggagacatcactctttcaggtgttcctatcggagtagaaactaagaaacacatagcttatatgcctactgaaagttatttttataactatatgagctgtgctgataatctcttgcaaattaattaggcaacaaaatagttcttccttctgtatctgccatcgaataacatactaaccccgctattgtctgcattccttgcttattagggtgtattccatctatcgaatcatatggttttctcatattgtataaatcaatcagtttacaatttgattcatatacaatatttcgtattatatcattaaaatcttctatatgaatccctgcatatttatgtggaaacctgaaatctggcttgcttgacatatatgtctcacttaaagtacaacaccagacttcactgtctggataatttaattttatctttttgagcattactctgtatgctgcttcaaacaattcactatctatatcagtaagaagctttgtttctattcctgtccttactccaaaagcccaatcgtttattcccagataaataataattacatcaggttttactgaattaatatgtaatgctgatgttctctcgtcactacatccagaagggaataatccttcattgccaacaagttttgtaaccctgctacccgaccaggaattgtttactaataattcgccatcaaagaaatctataactcgtccccaccaagtatctttaaactctgcaacattagattttgtactgttatccccataataaaacaccttatatccattaggattataaccacctaatgtactgatagaatctcctaaaatagaaaactgcctaccaaaatatttatttctttctctccatttaaagtatgtgccaaattcgttttcaccccttaaaattctaccattaggtaactctactgttccatatattctactcaatgaataattatctatccacctcagttttccaaactcttctgacttaatatgtacatctaatcctgaattcgccgaatccccaaaaaatttcttttcaaatgcaaatatattaggacatggttcatacggattatcgttatttgtgctttttattgcaaacacaatatacttaaatcttttatcatattcattctctataataacatcataaaatgcttctgctaccacctgcggtggatttttaaatgctccacagccaaaagcaccaagaaccaatacatcaacctcattatcgattgcagcctcaaaaatatttttaattcttcctttaaatatttcttttaaagcctttttgtttgtgtattttcttttgccaataaatggtgccgaacatgtaataacatccacactaaaccaatattcttgtggcattatttgcggtactatattatcatttttaaatactgtaacatctttggtatatattaatctatctgaataaaaatagttttttaaatttctatgatagccataatattcttcataaacatttgaggcacttatacatgcatataaattgctgcttctgcatagacactcctcctgtgccattgctccattacctacccctccacccggaattacaggatttgcgaaattaagcacagctaccctcccatactgtaaataatttctaacaatactgaatgtagttcccgaacatatattaatcacagcatgttcttcttttcgtttttgcgttgacacaaatccttccatataaactttgtttgatttaatagaataatttgtattataacttactcttgtatatattgatatctgaaatgtatctttaaaacaatttattaattcatcacttaacatataaagcctcctatacgccgtaagtgctacataaaccaccatatgattaatacagtcggattttatatagaaatcagatttcaacctttatcaacatatattttatcctaactgatatgtaatgacctttgtcaagagtaaattttgtcaaagaccaccacaaactttttatttaattgtctgaagacaccctgagagagcctcggagtatcagttcccggcattgtccactctgatatacgtggactggttacctacaggtcaataatctgccgtgagctctaccgtctaaaagcgtgtatcacagcttacactgtgccaacatagttaggtcgtagatggctcgaaccttgaaatggccgaagccctttcaggatgtcttcagttgttactgatcagatgtatgtggcataagccatcttacatctgcttgattacccactatcacagtgggatgatgtcaaagttgcgaagcaccgctttagcggcttaaccttgatattagcagcacagtgtgatttatccctcatgatatgtgctcagtcatcatgccccacatgaagcatgctaactctcttgcaaccgctacttttgctacattgtgttttttactctgaccaagcaccatcttgtagtatcggcgtcttagtctttcgtttgctttgtcggcatagcctatcacctgtgctgaattgcctgattgtttggatttcaaatcttttgatttgtagccaatctgaccgcgggcatagctttgagcagcctctgttagcaataagcgaacatgtcgattgccagctttggtaattccaagcagattgcgatcacctgaactggtattctcacccgggaccagacctagataggatgcaagttcttggcacttgcaaaacaattgaagtcacctacttctacaagtacagatagtgcagtgtgagttctgacaccaataaaacaacgcagtttctgaacagattccttgtattcatcttttgatgcaagctcttcaatgcgcttgtcaaaacgctcaatcttgtcgttaagagtagtatatatcaacaggtactcatcaatggtctctttgtatagagcctcaggctgtaaagattttaaccagcataaatgcgctgccgtccaatgactgttaccatcatagcgataattatggcgaagacagaacgtgcaaggatctgttatttaatcttttttagagcaagcttatgatcatccctcatgcgaaggaattcctttatctgctcatctgtgacagtaggtatgtgaacaggactgcagctatgttaagccaagcatttcgcgataatcacagcatcacgtttatctgtcttaatacgctttttgctgcgctgttccagcatagtagttgaagcaagtattatacactccacatgctgtgaagtcatctgatgataaagcgtaaaacctaggcaaccagcctcataaccgcatataaatttagcattgcctccgtaaatggtacgaagaaactccagatatttcagaacctttttataatcagcttctgttttctggtagtgagaagctttctcatcttcaattgtcattgagcaaagtgtaaaactttctttgtgaacatccattcctatgtaaactgtgttataattcatttgatgacctccatttgtatgcggtaatccctgttaccattgttttttccaattcatagtatacaggtaaatccacgttgctacaaatcggaggtcattatatattgtctataagttaaaatataaaatttttgattctgtatcaaacttaaaaaattgtaaaactcaatatttcaagttcattactctcccacaacagtggcatttcatcataactattggcaatcttggataatttctattatctgtaatcatacatgataattttatactcttgttacaacaaaattaccaccaaatatgaataatcagatatttcatagcattgtgagtgaaaactaactagattaatatttacacctattcttttatgctaatttctattctattaaaacattccttcgcggatttttcagaaacgttatttcccaaaagtactcctgtattagtaccttcaatcataataacataattatattcagaatcattataattccacatcacataattgcatttgcccttagttccttcatcaattattttcgcattatcatcagactttacactgttaacatatgcactgtaatactctgctgtaataaatgttccctggctcaattcttctttatccttagatatcgtaaaaggaacatctgacgataaactatatccatcagcagtatttattgaaatgacaacttcatcacctgtttctacattatatgtgtatgacaatgatgtttttgaatcaccacatcctgtgaataaaagcatgacagtcatcaacaagcatggaacgaactttatatattttttcataattatgcctccctaattcctttaatagtttcttctgcttttactttgaatgccatctgttcttcgtcctgatatcccaaagcatatacatgtgaaatttgctcacgattgaacaagaacattttctctgcatctaaatatccctctgggaaaataacacccgtataatcccatattgcattaggattttgtccacccttctggcacacccctactatcattactttctttttgctgtttccaatcaataccacactaccgataggcaataattctttacacatagtcatatcctcctataaatattttcttattaaacaaattataattactattaaaaaaaatataccatacttaatgtacactttcaatgcatctgacgagtacttatagcaaggaaacatatcatcgtccaaaatttcacacattctattaatgccatttggtgactcccagtattctacatcaaccatcgtaccattaagtaattccttagattccgacgaataatatatagattgcgccttaactgtacatccattcaaatttaccgcaactatataccttataactccaggttcattatcaattacatattgaatcattcctgttgtttttattttatccatactctcctaaaaccaactagttacagttttccatcctttcttaagtccttgccatgctgattctgctttatcacatacagtgtcaaccattcctccaatatcgacttctgctccaacagaaacaccaactcctattgaagcaccaatatcaaatttaaatacccaatctttaaatcccacatccgcatgcgcaccaatgccaaagttgacactaccacttacacctacttctcctcctaatatattgacacccccagttgcttctaattctgctgctatagcctcagccttggcgcttgcgcctaattgcaaatctagtttgccatcttctccatatatttgagctccaatatcagccttcgcgcctacatcaccagcctttacttcaacatcagtattaaatccaagcatctcatcaccaagccattgttgttcccactctacatctaaagcagtaacacttgctccaacttctgcatttacacctggactgaatttcttctcaccattattgtcaagagtatataatccagcagagatatttgcatgtgcttctgctcgccctattactacctctacactgccatctccaaatgtatcaaatgacccatcatatatactaacattggcggatactgatttttttaattccgctaaagttatctcttttttataaaatttaggagcatcattcttggatatttcaccttcaaaaacatcataatatttaggtttaatgtccgtatcaaaacgttttccagaactctctagtttttctttaatttctttatttcttttattactctcctttttccctagcccatctgtctttaaggatttcttctcacttgcctccaatttagcaaagtaatgttctgtatgttttgattcaaattttgcggtatatatttttactgattcccctccaaataaagaatctaatttttctttgcattcggcacctaatatagttaatgaatactcaccattgcttgccttcaaaatagaagctgcaaatgaattgctagattcatcctgctcaaccataaaattaagtaaatttgtataaaactcattgtaatgtgcactaacagctgtaaaactgtcatatttagtatcttctgccatccatgaaacataatgtaaaacgtccactcctaattcatctgttccaaccgaagccaaagtttcatatatagcaacagtttcctgcaaggtggctattacatcaatcagcatttcttgttcttcttcagacaactgagcctgatctttttttaggtactcatatatcaaatcctcattaaaaatcagctcaccatccacgttctgaaccatttgatcttttaaacactgtacatttgaagtattcatttcctttagtaatgaatcaaatttactactcatagcatttgattcaaacataccattgcttggagttactatggtattcatagcatctatatacgatgatatttttccaagacttacatctatattacccataattgtaccatacgtagtatttacatttgatacattattaaatatggtctcaatggagtccttcgttgcattatttttatcaatgactttcttatgatatgaattgacatcattaatataattccttatattaagtctaccaatccaactttcgaaatcataccaacgatctccaatccaatctgtcaggtcacatagcttgtcattttcaacctctgatactagtccaagcacccgctgttttgaggcatctgaaaaatctctatacatctttcttcacctcccatcatttaattgttttcgcagcattattgtcactagacacataactactctttatattattcaacaaggaaattgtattctgtaacaacaattccattttatcttctatgtttttgaagtcaatacctatcttttcaatattagcaactgtgctcccgcctccaaccactgtgggtgcattacttttatttgtgctaattttgctcttcaattcttttaaattatttattccagactctagactatcaacatctattttaatctctgacaaaatttcacctccctgcaatctagaacagatattgatccgcctcatctatgctttttaagaaattagtcacttggctttcagcggtctttgatgcattatttatctgtccttttaatttcttcgcatatgaaatataacttttcaatgatgaatttacatttcctttttttatacctgtcttactgatattttccagtattgtaatatattctgataaatatccctcaagtttctcgccttgatcagtataatattttttcatattttcacaatactcatcatctatctgtaaactggttccagccattatttcacctcctactatttatctgttgcatatggcaattgacgtctccaataattagctctcccctgcctgtaactcagattggaattgttatcatttatttctcgatccaacgaccttatctgagagttaattctttcttgagctgtcgataaaccattgtatgtatttctatactcagaaccagataaaagtccattcattgcagatgcatataccgaaagcatttttacatttaacttcgcagaaaatactgatgataattttctttttcggttactctgcctgcttccaaaagcattctgtaaattttgaaattttgttcttaatctttcaagttcatttatctgcgattgcaattgagaaatattatttctatattgcgctaccaaattttcattgtacctaatattactctgcacttctgcttttgtcattcaaaaaccttcttcctaccgatttcaatagtggtgaacggtaatttaaattaccgttcacctgcaccatcaattaaatgaatcaacttatgctttaaactgatttgcaatatttctgtctgtatcttcgacaatctgagctgtattctttaatgcagtagaaatttcgtcgatcagatcttttgccttaacaaaaccaggtctaagctctgcaaatctttgtgcatacgcctcgcttgcgctaccttcccattcactctgaagatttttaagcaaaccgtccattttggtgatgattgagttgagattattcgcctgtgtagtatactcacctgctctctgtctcattttttctggtgtcattctgatttgactagccatttttttacctccttgaaagattattttatgaaaattggactatccaatcatcaacatttgttaattagtgcttgtcagttttacttttaccacactattatccttgatgtagtaagcatcatttaattgcagtcgtttcttattagctttcatgtcctcgtatgcaacatcaaagacttttaaattatccaaatcatcaaaatataataaatgacgttcctgtttgatatttctgattggttctggagcatcatatgacacattgacattttcataattggtaaatatcactcccacctttaggtttttatatcttgatatcatatcggtgtattgattcatagcgtccatatcctcgtatattactttcgccacatcattattatttataacgagcagaagtaaatcatcactctggctttcatcctcatctatcattttctgatatctggtctgcaatatgaaactccattcatttaataaatcaataactggctctgtcgtaatcgtgtatgtagaaacaatagaaagttccttgcatcctttgaatccacgttttacatcgtcaaagatacatacccttactggatattcatttctcctatcacacatttgttttagtatatccgttacaaagtctatatgtatctgtgtttccttaccgcaaataccaattgctccaatatttgaaaaatcaatctcgaacggtgatacttcattgtatgataatccaatcggatacctatactcctgcgggaatacaccatattcattctctaactgttcctttttaagaatagatggtatataaggaatttgtttagcagatattcctggattcaatttattagtctcctgcacaaaggttctgattgccattactctatcgatttctttttcaccttcaaaagcaaggtatgtttgacattctaatgttcttttatcgaattctacaatcgcccttcctggtaaatcttctggttttaaatcaacatggtcaaacacatttccatattcatttgaatcattacaaaatagtgcaattttattcccaaaattagacagatatctatatccaattccattagtctgagaatttgcaattattacagatattccaacagctatcccctctcttattattcctaaaaatgtctcatcattttccaagtataattccatcaacgcagtcatattatccacaaaaatatatatatgaggcatatcgttataaccagcttctatgtatgaagaaaatgaacttacacctacagacaccattttttctcttcttaatgtcaattcatcttgtagcagcttaaacaaattttttaatttttcgtcatccgttggacaaacgaccccgccaacatggcacaacccctcaaaattttttagtactagcgagccaaaatctaatatatatatttgagcctcatttgcttttttctttgaggctatctgtcttattaaaagttgaagaatatttgtttttccatactgtgatgagccaacaataaatgtatttttgttgtcaatatcaattgacatttctccttggtactgattatccggatcatcatatatacctaaaaaatactgccttgaatcaacttgctcctcataaataattttagcttctaatgctttaatacatatattcggcaatggattaattcccatttgttcacaatattttgcgacatgatctactattgcctctaactgattttttcctctctcatcacctttcttacgtttctgttcaaatacctttttctttttgccagataattctaattcatagatgcaatactcctttacatctgcatcatcactttgagctggtgctccactatatgcagattgaaataattcgaatatttcattatttcccacttgaaaatatgccctacctggttcttttatttcagcagcaagtggtgactttagtacctcattactatcttctggtccctgaactttcaagcataatttaaatcttgagttactccatatttgttcatcaacctgacccgcaggtttttgagtcgcaagtattaaatgaacacctaaacttcttccaattctggctgctgatatcaattccttcatgaaatcaggctgttccgctttaagttcagcaaactcgtcaacaataataatcaaatgtggcaaaggctctaagacttcaccagccttatatttttgaatatatttatcaatatgattcacctctgcctctgcaaacaaatattgtctcttttgcaattctgcttttatagattttaatgatctatctatttcttttccatcaatattagtaatagctcctaaaagatgtggtaaatccttaaattgatttaccataccgccacctttaaaatcgattatcaaaaaagcaatctcgtatggatgaaaatatgtagcagctgacaaaatatatgactgtaatatttcagacttaccggaacctgttgttcctgctacaagtccatgtggtccatgcgctttatcgtgcaaatctaaatatactattcctgtttttgagactcctagcggaaccgacatagacttatatacccttgtactattccagcgtttctgcaaatctaaatcatcagcagaaataatccctaacaatttatataaatcaatattttttgtaaggcttccctcaagagaaatctcctccgcttccacaggagcaagcaatgaattcatacttaagatatcattgttgcttattttcgcataattaaagacattgcatagtgcttcatttgctgtatttataagttttgctccatcttgatttatctggcttattataaaatcacatccctgcggtacctcagatgaattttcagaaaaaaatacaaatgtaacccctaactcagccgcattatctatgaacttagaaattggatgacttgcaaatccatataaatcataaaaaaatattacaaattcaacatattctgcctctttattatttgcccttcttgtaagttcattataaataaactcaaaaacaacatttttgctttcttcattacatacaatatttctgtttccagggattgtattcgatacatatggaagtaatctaaaattttgagccatttctctattcttatcttccataataaaaaacaatttcacatcggtataaaaatgccttgcacatatgtcaaagacaatgtcattaagtaaataatttctaaacttatcatcaccaactattccaattgcattacttgatttaaaatcacaaaccactggagattcatttattgttttcaattcatcgcataatttttgtggcagcaactgtaattcgtcatcaatctctaatttttccacttttttatacttaatttttttatgtgcttctattgtcccctgtcctaatgttacctgcagaaaatcaggatcttttctttcacggtcaaataaatctggtgaaaaatcattcaaatgttctctgttaacatcacaatttttatatatactagagatattctccaattcactctttctgtcactctctatctcgcttcgtttattaaaaatatagtttttatattctatttctctttttcgaagttcttgcacatattctctttttccctgtattacccccactacggttgttacaattgccattcccgctgaaattccactaaaaatcaacatagtggttcctcccatgtatgccattattcctgcagcaaccagcattccaagagacggcagtaggctcataactacattatttttcggtttttgaggttttgatggtggatccagtatttcgatttcctcttcatccaaaacccttttaacccttgtgtttcttacaaactttggatatttgtttctattaggataatcaacataatttaacccaacgcacctacattcattgattgcctccgtcaagatggagtcttctaggatgcaaaaactaaaattagcaattgatataaagtccccatacttcaaatgctcattatttacaagtctattaccattacgtttgatatcatacgttagtgaaatcactttcacctcatacccatctgcgcatcgcaacaataatattttgtcattttttagatattctccatccaatacaatttgacagtcattctcagaaccaatggatatattattaagtccagcaacactaatttttctattatattctacctttttgtcgtcaaatataatttcaaactcaacattaaaaacgtcattattgctttcctgatattttaagcaaaaacttatcccatgtgataagtttatatttaataattttctactttcaccggtggatatgtataaattgtctgaacacattaaattccattgtgaatttattttttgcaaattcaatacaatatcatcaaaaaaacaatctctgtataatctataatcgcaatcgattgttgttccaatcttatatttacttactgtttcaggtaattctatttctctataaatcttcttattataaataattatcttatatttattgttcatatataaagccccacctatcaagaataacttattacactcccgtttcttatacctgcatctcttagtaacatatttcctcttaacaacattacaggattgtcaacttttaaataacatttctttatatcatttatatcaatgtcaagttcataggcttcatttaaaccaataacaagttctcgcgctgtgatatacaatggtacttccaaatcaacattaatatttttttcaacattcttaaaaataactactacactatccgtcatagatattcttcctttttcttaatcaaattattagaaatgctaccttttttaattcattcacatcaactaaatcaatattcttctcattgccacttttttttatctgtggtacatactcattaactgcaaatttaagccttatatcaggtgatataattgcattatattgttcactattaaagctattgcagacaaataaatatttatctgtatttaaattatcaatatttgatacaaattgattagttgcataaactacgttattttcttgctttagcactacaattactttatcagataaatcaagcaagttgattttttgctcatcaaaggaactctcagcatctattatgacataatcaaagtcatcactttttttccctgacatagctattttttcataaacagagtaactcaatcctaatgacaacaaagctgctttaaacggaggcaaataactaaatccttctttcctaataacatgctttatctcttcatatattgattctgatggatttaacaacttagtgtatatgtctggtgaagaaattggagcatcgtttttcaacatacactgtgcactttgaagtcttgcagcttcaatatacaacactctcttataattctgtgccagacaagctgctacccccattgccaccgtagtttttccaacaccaccagctgccgatgtaaccaatataatctgtgtctcttttgtctctactgcagcaacatttaatactccagcactttttccgataatctcattaaagatttctttaatgcttgtatacttaaaaagctgatttacatttaattctcctgtaccaccttcgtcatactgctccatcattacaaatatattctggatattatgacgttgaagagccgaatcatataactcgtcagaaactattagaatctctgcattctgtggttttgaaaaatactcatcaaaatatgctctatctgtaatgacttctaaatctattttattgaagaaatctgttacaaatttaaactgaagtgggacgatataatttgcatcttcatccgcaataatcaatctaggtcttgccattttatcacctctttatactatctggaaatcactatctgctaaacggattacgtctccacggttcatctgtattttttgtcctggattcaatctaatgccgtttacaaaagtaccattagcacttccttcatcgttaatataataaatgccattcatattggttacacgacaatgctttctactaatcattttgttaaatggaatcaccaaatctactaattcctgtttcttaccaataacagcgtcatctttatctattactaattcgaaataatttggagcattcattgcaaccatttttatagcagaaaagttgcttgatgtaggcatctgttggactgtactttcttttttttcaatgggagctgttcctgcacctcttgatttgttataaacatcttctagagaaagagagccgttgcataaatccattaccaattgatctaatctagtatttgaagttgtaatcactttattcacaagctttacaatgcttgttctaagttcactctcaaattctacatagctatcaaacgcccttacactaagcggaagatatatcagcttgacctttaatgtattttgctcaacgaatatcttgtcccaagacaaatctatacactgacatgccaaaaaaccattatttcttacttcaatcacacttgaaaataaattaaccacaacatttacaagtgtgtctgcattaattccaacaaacatagaagccattggtctgtattcgtcagttacataatataaatcaatcaatccatttctagtcattttcatgcacttaacaaaaataccattattttgactctgtaatactttataatcagtattaacaaagattgtattgtcttttaaaatatattcaaaattgttaccgcatgtaatctctgaaattacacccttatcttttaaagtgtacatatgttttcctcttccttctcaatctactatttatcacatgtaaattcttatatatttctttttcatataaaaacttacatctgacaaatagttttccccagcttttcataatcaaatatatgaaaagctgagaaaactatttttaacatcttattattctgtttctttcttacgcttcttgcctgctattattccagctgtgactccggcaataaccacaacaactcctgttattgagccccagaatatgcccttattagcgtaccagcggacaaagaaattagtagatacaattactgatggattaaatgaatatgcagcattaaaatcatttgcatcagtatctgtaacattaccggccatatctgttaccactattctgaccttctgtgatgcactattttcttttaatgtaaagcttccaacatagttattcatatcgcttccaaaatcagtaaccttctgaacttctttcccgtccacttctactgtaactgatttcagtccaattgtgtcatatactgtgtattcaggtgtaacttcagtagaatttatgacactcttttccaaacctttaatactacttatttctggtgaagtactatcaaccctgaataatattgaattagatgtataattcgtattatctggtgtattttcaggtgtgttgcctgttgcatcctttgatgctactgtcaccttgtaaataccatcttcagtaaagttatctttctctattgtgtactgatactgataccatccactattaccaacagcagtttgttcagatatctcaggtgtaacagtatactttgaagtattgataggcttaccatctcttgatatcttaatatctaatgactgtgaaactaatctgtcagcattgtattctgtaattaccagattatcattaacattctgaacatatgcaccaccatcttttataagtgatacaagataatcattatattcatatactgaaccaaatctgttaattgtaaatgtttctgatttatcgcttacatgtccagctttatcactaactcttactgtaatagtgtatataccatcattatcctttattttttcaaatgaattaaagcttcctgctccggtattatcatttatagacattctgttacctataaacttatctgtaacatccacatttttatctgcataacttgttcttgtaagtattatttcataattctggtaattcttatcttcaaatgcaactccaagaactacatcatccttaaatgcccttcctgatgcgtcttccccattaattgtaattgtagcctcattaatctgtgtatcaatggtcatctggtcagatgcatatgtctgcatctggttattagatttatccatataacttacagtaacaaaataatctccgtcttcacttagtgtgaacacacctgtatgcatatctgctgaattatcagtccaatcaacatttacaggataatcagttccgtctttagttacggtgataacagcatcctctgaatagaaattagcctcgtttacaactattgttgatataatgtttccatcataatatgcaataccatctactgtctgtgctggcgcattatattcaatagtagatattggagttatattatcgacaaccagtctctttgtatcttccagataatctgactcattgccagctctgtcaatggcatcaaaattaactgttccgttaaactgattactatctgttaatgcttccctaggtatctcaaaagttgctgttgctgccgctccactatctgaatatgttatttccgcttcttcaatagcctggttaatcaattccgcattaacatcactcacacctgatgccttaacatagctgtattggaagttgtgaactgatgatatattatcagttgcactaatagttacagtaacctttgaattataaaatccaaatgatatattagaaagaaatgtatctaataaactattgctatatgaaatctgaaggtccgtaggtgttgttttatccactgtaaaataatcattatcataatctgatgcttcattagtagctaaatcagtataagcaatatcaaatgtgtaatttgcatcacccggataagtaatggtcattgtatgtatatctccattatttgtccatgcagatttaacattaagatcatctacatcaagagcattaccagccacatcagttgctgttacatcaagcacaacctcgtctgccttgaaattatgctcgtttacaataattgttgctgtctgtgtctcattgtagtaattcctttgattaccactattatcctctaatgtatttactatattcttattagaataatctacggtaacaacaggtgttatcgtatcaaccaccaaaataccagatgaatacacatatggcttaccttcgtcatctttcatctgattttctgatttatctttgcagtctactgtaaagatataatctccatctgctaaatgatcttgcgttgcattgatggtatatgttccgatatgaacatctgctgaactatctacccattcaggtgtaatcagctgagcctctcctccattcttagataatttaacctttacatcttcaggaaagaagttagcttcattaactgtaaatgtagctgtaacatctttgttgtagtatgccttatcaccatatgttctgttcgcagatgtatattcaactgtcatctttggagaaatagtatcaactataatcatatggtttgtatctgtgtacttattactttcattattacaattatctgtagcggaaaatgaaatattacctcttaactgctgtgcagtattcaatggcagaattacagttcctgtgtacttacttgcatcttctttatcttgaactgcttttatatagccatcttcatactgagcaaggtttacttcacttgcaccttcctgtcttttatatccccatttaaagttatcaattcctgatatatcatcatatgctgtaaaagtaacatttactgatgggttataaaacccaaatgtaatatttgaaaggaatgtgtctattaaagattttgaatattcaactctcattttgcttgtatctggtgctgaattatctactgtaaattctcttataacctcagcagcaggatttaatgccaaatctttataattgatagtcatttgatatattgcatctgataaatagcattcgttattcttgtcagatgtaataactgctgtatattcctgtttatcttcatcatatgaccagtcacaggttcttaaatactgttgaaaatcttttacagaaacattttcctgcttattatttttagcgacggttttaacttctatatcttcttttctgaagttcttttctttaatagtaataactgcagtctgtggtttatcagtcgcatcgtatgaattatatgtaaatgtaattacaggagctgtcttatcaataacaaaagtatctgatgtgtaatttaaaatttcacctgtgttatcaacaatcgcatttcctgaacggtcactgtattcaagacttactctgtattctccctcatcagataatgtaaacgatgttgtatacttatctgacgcttctactttattccatgtaagtccctgtaactctttcccttcattatccttaattacatatacatgtacatcttcaccaaagaagttaacttcttcaatttcaatagtaaaatctacatcacctgaatagtaacgcacattgtctactatattttctttataagttttattatcttttaatccatatttaataactgtactcttaggtgcaaccttatctactacaaatactctgtcagcttcttttgtttctgaaacttttcctgccttatctgttgctgtaacactcaatttaccattgaggtatttcacctcttctttaggaatgctgatgattgctgtatactttccatcagaagataatttcgctttagcacttccactaagcttctcagcattaacttcattaactccatctttacgagtatatgtccagtcaaatctatcgacacccgatgttgaatcttctgctgtcaggataacatctatggtatccttataataattaacattgtcgttaaataattttaatacatctggcagcttaacaccgatttttcttgcatctggtgcaatagtatcaatcttttcaatgtttgtatttacaacagctgtaataccatttgttgtactattctttaaatatactgtacgtatcttttctccctgatcatctgcatcaccaaaaattactgattcagaaaatgttccattaattgtcttagaaatagtatatccatctgccggcacaactttaatcattgtcttgtaatagccattgtcaccattaggccctgttaatacagtctcttctgtacttacctgtccaggatattctacaagtttaatggcatttgcaggtgtgctttcatatgaaatcttaatatcatatgatgtggatgctgcctcatatactacttttcttcttttaataccctctgctttattagctgtaacagtaattgtaagattattagaagcttcaagagcctctgataattttgttatatctgaaactgttacttttcctgttcttgtatcaatacttaaaccagcagtactgacagccttattgtttccttttataacagcgctatatgtaactgtaccattatcatctcttttcgcttttgcagcctgcttatttgacacaatattattggaaccaatagtataatccaaagaactcacatcaaatgatataaggttatttccattgttaactatggttaaatcaaagccgcaggttgcatcattgtaattatcatcaccagctacggttgctgtaaccttagcaatgcatccacccttctttattgtaagttttcctgtggctttatcaatggttacataatcatctattgatgttgtatcatcctcagctgcattgtatactgaataagttactttccttacatctgatgatgtactgcttaccgcagtaaactgttctgtaatttctgttccagtatatgtaacactatcttttactggtttaacagtgaaatcaattgtctgtgaagctttaacaatagttgtctctgttggatttaatataatagatgttacattataattgtcatctttggtattgctatttactgctttatttcttgtaacacgtatctgaacagtatatttaccagcctctttccctttaggagcatcttgggtccagcctgttgtatcatcagtaaatgtttcatcaccatgaaccattctgtactctacaacatctgtatttttaacacctttaacttcatttaccagttcctgttcactaccattatatgtaagccctgtttttaacgaagcactaagtccctcaatatcaattgcagttatgtttatggttccattcttaattaaagtttcatagtttgctctctcaacctttacttcataattatttacacttacattctctattaagggaatattatcctgttcttttccgtatttatatgtataatcagttccatttaatgttacagtaacactatctcccgttgttaagccttcgaatgaaactaatttatgactttgtttatcataagccacagataatgcaccattgccatatggtgtgatagtcacacctgtaatctgaagcttattaattctagcagttaatttaccactttcgtaagttgaatatcctgttctttcaactcttacataaaccggatattctccagcattagtttcttcaggaacatctgtactccaactaatgttatctgtactataagttattacatctccatctttagttcctgtaactgttaccagcttctgtgatttgccagatgaataatcaccttcgaatgcgatacagctaatttctttaatttcacttgatttgagtgtaacttcgtaattatcagtttcacttgcgataatctgatcttttacagttgtactatcagaaagataattatcttttgatatagttgcacttaattttagtccagtttcatattcaccagatgctaagacctgtacaactccatctgcattagtatatgccgttgcctctttttttattgaatttgtggcagggtttgtaacattatattctacctgtgctccctctactggattgttctcttcatctactacggttattgttactgcatctgtaacagtatttgtagcagcatttacttcaatagttgatatcggaatgagattcaatatcataagaaatgccatgaatgaagcaattattcttcttttcttcattctttcgttgattttcattgctttttcctctctttcgttttttttattcttttatataaagtattttcaaacaggaaatgtgcatataatgcaaaaacacctattgctatatctacatatgctatatatctgctttcttttcccatcataaataaaataacaataacaacgattgcacctatcaatgcagcatcagctattgattgaggaatattagcaaataccggtatactttttctctgtcttttatgattattatccagatgcctgttaatctgttttataacaatcactcctgcaatactaattattaatgtcagccaataaacagctcctaccattgccaatgtaatatgtctttggttaatactattctccgataacggcattaacaaatatgtacatgcatgtaatccacacatcaaaattgcaataatataaactatcctaaattttttcattttatgaaatcacctcatttgtgtgaataatgattatgttttcgatataatcaaatgcattatttatatctggctgttctgcctgataatcactaaggagcgttgttgcattatcatcgacaagaagtgttgtcgcattgtcatcaacaagaagtgctgttgcattattataaacaaggatttccgttgcattcgtatcttttaattctgacgttatatttgaattgtttaaaactgctgtttgttcatcatctttaatattcgatttctgtgtttcctgtattttatctgttagttttcctctttgaagatttacattacttggaacatgtgctttctttcctgtcttctcgttattctgtctcatacgctctattgattttcgggcatttttccctgataaatctccccagacagatggtatcttaaacacaaaaaataacacaactgccagcaccagcaagattccagccaacacaaaagaaaccagtgaaattatgtttaatatatctgacattcctcttacctctcttccgcattaatataagttctgataacagcctgtctatatgtatcataattatcaattatttcttttttcagatttaatgactgctctttttgtactgttaatccatttgcttctttatatactgtatccagaatattaagcacttcattctggctgatattaacctgtgcaatattgcttctctggtcatacaaaagcatgaagactgcattatagaaagaaagctggtcatacgctcctgctgttttaacactgcttaatgtctgattaattgttgtaaataagttctcgtaattttctttagatgcctcttcaaccttagccgaacttaaaatgtattttttgtagaaatcacatatctggtaataacagtctgataacgctttattgctaaattctgctgaattatttttattatcataattcaaagtaaaaaatggatatgctttttgtattcttgttgaaaagctatatgaaccattattttctgtataataattaaaatacatcattccaactttataatttaattctgcttcttttacatctgatgtatcaaagccatctttatgctcgttatatatcgcaagaaactgatcattctcagctttgctaaaagttccttcatcttcatacgcttcaataagttttagataagcctccagtctgtcaggatatatttctatggcctgcttataactgtctattttatctgaaagtgatgtagatgttgatattgaaactaatgcatcataattattattcttgatatttacagaaattctgttacaaataattcccgaaaccagaaaaactatcgctagtgccacagtaataataaatgaccgcatttttcttttttgtttctttttatagtcctttgttatcagttctggatgctcaagatcgtataacaaatccgaacagctctgatatctattctctgccgccggttccacacatttatttataattaattcaataccttctgataactgtggattccacattcttacaggtgcataggcttctccacttcttggatctattcctgtaagcaaatgatgcatagtcattccaagtgcaaaaatgtctgaccttgcatccgtctgtccgctatactgttcaggtggcgcatatcctttggttccaaggactgttgtatcagaaagtttttgttctttatattctcttgctatgccaaagtctattatcttaatattgccttccggcttaagcattacatttgcaggcttcatatctctatatataataggtggtttctgcgaatgcaggtattcaagtgcttcacataactgttctgcccatgcaataacctgttcttccggctgtgctccatattcattaagcaccttatccagagattctccttctatgtaatccattacgacatatatcgttattccgttgtcaataatatctacaattcgtggtaaagcagggtgatcaagttttttcatcatgtttgcttctgcaagcagactgttaacaaccacttcatcatttttgccattacctttttttcttatttctttgacagcccactgtttattcagatgtgtatccattgctagatacactatcgacattccaccgcgtcctatctctcttaatatttcatatttaccatcaataactgttccgatttctgtcattgccaatcctcctgatacaccttgataagaactactgaaatattgtccttttcctgacgttttttgttttcatcaatcaatgttcttgcattggcatgcatactttctttatttttaagcttgctgggtttaaaatgtgtatatatctcttctgatgttatttcatgtctaaaaccatctgaacataacatatacacaccttctgctattctgccctttataatctgaggttcgactttatctgatgcccctatacactgtaaaagaagatttcttctcttatccgttttagcctgttctacggtcattgttccttttgctatttctcttgcaataaatgtctgatctgttgttaactgctgcaaagcctgtccgatataataagctctggtatcaccaacatggcatataagatactggtcatcacaaaaaagcattccagtaaatgttgttcctaaacttacatctgtcctttgaccatattgtataattttgttattaagatttttaagcagtaagctccattttccgcctataacatccatattcaaattatctatttctttgggcagttcattatcaaaccattgtgccaatgcccttataacagttgcactggccagttctccttttgataatccacccattccatcacaaataatcgccataactatttctttttctttatatctcgcttgtttcacaagaatactgtcctgatttgtatcctttacaatcccaacatcagtatcagctacaaccatatagtgcatatcatctctcctctttagcattaaatatgaaatacaaattcctcattacctaatctgacattatctccatcatgtaactctttttcctcgttaggaactaacttaactccattaataaatgttttattagtggaatttaaatccataatataatactcatttccacgcgttataatatccgcatgacttctactgactgcactattgttatttacaaaataatcacaataacttctttcttttcccagtctgaatactggtttgttaatgtctatattttcatttgtgctgactctgaatacagatggataatgaatttcgttctccacaagcaaggtagttgcattatcatctaccaataccatagttgcattgtcatcatataataagcctgtagcttcagaatcattggcattgacatttttattatcataatgttcataataatcctttggtttatctgtcataaatccactctgtcccggattgtgtttctttataacatcaaccactcttctatcttcattagaaatatatgcttcaatctgtgcaggataaaaatactgcaatcctctcataaaacatgtaaatctttcgatgtaaccatcattttgttctgcaactgggtgtgcttttccaataatctcataaacaacattaaacatatttatctgttgattctgatactcaactattggcagatatatgaactgcaattccttagtttgttcatttataaatatattattcaagtcaaaatttatcctgtttataggcaactgtgccatcgacatttttccaagcatatcaattatctgttccataacataaagaaaatcatacttattaacaggtgcttttaaacgcttagttaaacttatccccgatggtcctgtatattctaatttattgtttccaatcttccgtgcctgcaatagccccctaatatactttcttgtaaaaaagtcaaactcgccttcatttaaagtttctcctgaacctagattaacccttacagctaatgtaaaatctttgatttttgatttgaatttagccataatcattttcctcgcttacaaacataatgaatttcattaaataatttatatttaattaatttttaattattttatcatactctttttagtattgcaatgtcatagtttgcaattgcaaattataacattgtttatgcaatattccttaaattgtaaaattttttatacaaccaaatattaatccatttgcaaaaggtatggtgattatatggacaataaatatattaataaatttagaattattggactaaatattgcttactaccggaaattaaggggactaacacaactacaacttgctgagcttgttaatgtaagtcgcacacatataagcaacatagaagctcctaatatgccaacatctatatcattagaaaagctatttgacattgcagatgtcttaaacattccaccttcatatctgctagatgacagaagcaaaattttatagcatcaatctaacactaaaaaatggagctgtcgcactaataatcagcacggcaaccccatttttaataatcattatcaaattaatttatattaattatatatcactaatttccattaatctctctcccattattatctaataaagtcctttagtccaaataataatatgttccattaatctgttctcagaccattttacattttaaataacctgatatgtaggtttatcttccaaaatcagagtcactgacttagatgctgtgatctactgtttatatattatctgtaattttctccacaaactgataaaatcctttaccagagcctcatcccgtttgtcactgcatttcttcataagctgttctgtatccgaaagcatatacagcgtatgttattctccaaattttacattcaacttcttaatatatcttaccaacttttcttttggttctattccaactgcatgcaacattttttcggcacctaatttttctctaatagatgcctgctctctctggtaaataacctcggtctgttttgttatcttatcctcacgcacaattttaatatttccctttgttttgtaatacttcttaatgagcttttctaatgacttaagtgtaattctgcccttctttactgcatatacaccaaaatcccctgtatactgattcggtctgccaacatattgaaaccccattaaatgtggtatcttcagttccgtatttatcagatgcaatattcgttttgcagtatgaatataataatcatttttgcacagtacatctttgatatcattaaatattttaaacaagcgggtatctttcataaatccatccttgtcgctggaaataggagcataatcatcctgttttcattttttacttctgtatttttcttttcggttatcataccccaattaaaaattttactatttttattattcctgttgacagttatattgttatagtgtactattgtgctagtacacaggtacgcgtcatgtgtacattacctattacaggaggagggattatggactataaggctaatataccaatttatcttcaggtaatcgatgatattaaaaaaagaattcttaccggtgagattaagcttggcgacaagcttccatcaaccagggaacttgccgtacagtacacggtcaatcctaacactgctgcaagaatatacaatgaacttgaacagtgtggtctgtgctataccaaaagaggtcttggcacatttgtatcagaggatgtgcatctgattgatacattaaaggcagaactttccagtgaaatgattgagactttcatttccggaatgacaagccttggtttttctaaagatgagattattaatctcattaagaattatcacgaataaaatatggagggatttaattatgctgcaatgtaaaaatgttactaaaaagtatatgaagatgactgccgttaatggtgtttccatcgacttcatgcctggcagaatatacgctctgctcggctctaacggaagcggtaaaacaactttaatgaagatgatagcaggtctggtaaaacccacttccggggacatcactctttcaggtgttccaataggagtagaaactaagaaacacatagcttatatgcctactgaaagttatttttataactatatgagctgtgctgatattggaaagtattatgctgatttctttgaggatttctcacttgaccagtactacaactatcttaatgagatgaagcttacgcctgacatgaaagccagcaagatgtcatcaggaatgatggctaagcttaagcttgctgttaatctttcaagaaatgcatctgttattatgcttgatgaaccacttaacggtgttgatattgttgcaagagagcaggttatcaatgcggtaatcagcaaggcttcacctgataagattatcatcatgtcgagccaccttgttgatgagcttgaagctgttattgactacgcagtatttatcaaagacggtgtgattgtttcacagggagatgctgaaaatttacgaacagcttcgggcatgtcaatcgttgaccagtacaaacgcatttatgcatattaaaagggggaatcttcaatgttaaaattaacaaaatacgaattgagaaagaatcttctcggtataggaatcgtagcaggtattatctgtgtacttcaggctctgtttatgtttttctgcctgactgaaaatcttaactatacaagccttttcggaggacttttaataatagctgcctctgtaagttattttattgtatttatatttggagttgtaacatattatagagaactttcaagcaaaagcagttacctgatatttatgacacctaattcatctcttagcataattacatcaaaactgctctatacactgattattggaataggaatttcagcaatattcatcggcttcggagttcttgatatattcatgatggctggtgtctttggtgacctggctgacgcactcaagaatttctcagaaatgttaaagattatgggtattgatgttgtcaatataattattaatattgtagctggaataatatcattccttatagctttcttcttccttatatcacttgcatactttgccataacactatcttcaactgccttgcagaacaagaagattaaaggatttatctcagttgtattattctgtgtccttgcatatgcaacaattaagatttcttctttgttgcctgaactttataagaatccagacagcttatcccaggcattaatgtcaagccttccagctaccatattccagttattaatggtggttgcatgcacattcggaagtgctgtgcttcttgataagaaggtaagtctgtaattcgtattcttgtggacggggatgttggcaaaacctactaaaagcttcataggatttaatctagtaggtttaattcttacaattacatatgaattttgtttaaaagacctactatcttgatgttctcatcgaatatagtaggtctttttatagttattctgttgttcaaagacagatttcatatccaaaacacctactaaatttcatatatcattctatttagtaggtttccagaccttacatgccatacatctcacatccaatggacctactaatatcctaatatctctctatctagtaggtttccggctcttaccaacaagatatatccttaattttatctatgctcttcattcttaattgcctcccagaggtttttctcaactttgcctgccataacagatagtgtctgcacctcttcttcactgaatccattatatataacattatcaattctgttaaatatcctgataacctcatcagccttctggctgccataatcagtaagtaacacattccacgaccttctgcttgccggattattttctctctttaacagatcatccttttccattctgtctaatgttcttgacatcgtagttacatccataaggcaagcatccgccagctctttctgattcataatcccatgttctcttaattccttaagaattcttggctgcccctggccaactgtaagcccaagttcaataaaaaatggccttatcagccgtcttcgaagcatttcaatatcaaagaacacatttttaatttcattatccataattacatttcccctcttaagcactgatttcatgcggtatacgacactgtctaatcaagctcaaactgtcctgtatacaactgataatatctgcccttctgctcaagcagttcatcgtgactgcctcgctcgattacctcgcccttttcaagaaccattatagcattagaatttcttactgtcgaaagtctgtgagcgataacaaatactgttcttccctccattattgcgtccatgccattctcaataagccgctcagttcgtgtatcaatcgagcttgtcgcctcatctagaataagcaccggcggcttggcaatcgctgctctcgcgatagcaagaagctgtctctgtccctgcgaaagattgctgccatcagcagtaagcatcgtgtcatacccttggggaagtcttgttataaatgaatcagcattggcaatcttagctgcttccctgatttcctcgtcagttgcatcaagctttccatatcttatattatctgcaatagttcctgtgaacaaatgtgtatcctgaattaccattgcaagtgaacgcctcaggtcgtctttcttaatattcattacatcaatgccgtcataagtaatcgtacctgactggatatcgtaaaatctgtttataagattaacaatagtagtctttcccgctcctgtcgaaccaacaaatgctatcttctgtcctggctttgcaaacaacgaaatcttgttaagtaccctcttttcaggcacatatccgaacacaacatcattaaatcttacatcacccttaagctcaataagctcccctgccggcagcttccatgcaaaaaatcctgtcttgtcagaagtttctgtaagggtattatccgcatttttaatgacattgcacaaagttactttcccttcgtcaggctcctctgcctcatccatcatgtcaaatattctctcagctcccgaaagcgctgaaagtatgaaattaacctgctgtgtgaactggtttaatggcatggcactctgtcttacatacacaagatatgcagatatgctgccaaggtccatgattccttttattacaaatatgcctccaacgcaggcagaaagcgcataattgaaatatgacagacttacaattaccgggataagcatgcccgaatatgcaagtgcattagtcgattcctttctaaagctctcattcatctcacagaatttttcaaaattcttctgctcatggttaaatactttttcaaccttctgacctgccatcatttcttgaacaaaaccgttgatattgccaagctccttctgctgtctgtgataatatttcttgctgcgtttaccattgtatttgataaagatgaacataagaataagaaaaacaacaacaataatagtcagccttacacttaataccagcatcatagttatagttccaaaaagcgtaagaaaactctgtattaccatggcaaaactattgttcattgcttcctgaaccgtatcaacatcattagtgaaatgactcataatctcaccatgtgtattattatcaaaatattttaacggaagcttctgtgtgtgcttaaaaaggtccattcgaatctcgcttactaccttctgggaagtatgcaccataagcctgttgtagccaagtgttgacagcgcaccacacgcatacataacacccattccgcacacagctatgataagtcccttcatattacccggcacgataaaattattaacaacaggctttattaaaaatgttcccatgattcctgcacctgcgcttataaatacaagaattgctataagcagaaatgcccatttgtaatgacccagatatgtaaggagatgcttaacagtcttttttgtatctttaggtcttttatatccgacatacttagccattaaagatcagctccttccttctgggattcatatatttcctgatatatcttattagtctttaacagactctcgtgtgttccaatcgcattcacacatccaccgtccataataattatctggtctgcatgacgcactgatgaaattctctgtgcaattataatcttagtcatatcaggcagcttctttgcaagtgcatttcttatctttccttcagttgcagtatcaaccgcactcgttgaatcatcaaggataagcactttaggcttctttaatattgctcttgcaatacatattctctgcttctgacctccggatacattgacaccttcctgtcccatctcggcatcaagcccacccggaagcctgtctatgaattcatcaacacacgctatgctgcatgcctctttaatctcatccagagtcgcattttcatcgccccatcttaagttatcaataagcgagcctgaaaacagcgtattcttctgcaatacaactgagattgcatctcttaaatgtcttaccgggtattccttaatactaattccatctatcttaatttcacccttacttgcatcataaagtcttggaataagctggataagcgtcgtctttgatgaacctgtctggccgattattccgactgtctgtcctgcattaatgtgaaatgaaacatctgacagcacatattctttagcagtatccttatatttaaaccagacatggttaaattcaatctcacccttcttaacttcaatgtcctttgcattctcatcagttatatcaatcggctcatcaattactttcatgattctttctgcagaagcaagtgaccttgtcataagaaggaacacatttgacatcatcataagtgaattaagtatcagaagaacatagctcaagaaagaagtaagctgtccaatcatcatctgtcctgaattaatcagtcttccgccaataagtagaataccaagaattgtagaatacataacgaactgcatagcaggcatgttaagtacagctattccaaatgctttctctgattcgtttttcagattatcattaacattcctaaatttttcaatctcatagtcaccacgcacatatgatttaacaactcttactgctgtaagattctcctctatacacctgtttacaaggtcgactgctccctgcattcttccatatcgtggaccaacattaatgattattatgatgagcaggactgccagaactggcagtgctacaagaaagaccagcgccagtgttgaattaatcttgaatgccagagtcgttgcaaatatcagcattaccggacttcgtccaaatggacgcattcctgttgatacagcattctggatattagtcacatcacttgtgagtcgtgtaaccaatgacgaaacactgaaatggtctatattagaaaatgaataagactgaagtttctcatactcagcctttcttatattagcacccagtccctgacctgcaagcgcagaaaatcttgcacttcccacacctaatataagcgctgcaactgcacatacagccatctggatacctttgtttattatatatggaacatctgaattggtcacacctatatcaatcaggtcagccatcagcttaggtaccataatctcaagcacaacttcaacacctatacatataagcgccagccatgcgtatttcttatattctttcatataagaaaaaattcttctcaacattacttgcacctccaattgttgcatatacaactattgtattttcaagttcaagcaatgtcaagaagacatttttataattattttacatttttcttataaaccatataagaaattactgatgtaatcacctctgtaatccagaaagcatgccatacgccaacagctccggctatccttgacattatgaatgcaaccggaattattacagcaacatatctgcatacagatataataagtgacggaaatcctttcccaagtccttcaagcgcacccgccgaagtaactgataccgttgatacaataaatccggcacttattattcttaacgctgtctcgccagcacttattgtatctggattacttgtaaacagaccgataagtgaccccggtattgcaagacagagaattgtacctgctgccataatagcaaatataagtaccattgatgtcttatatatctttcttactctctcatgctctcctgctccatagttatagcccataagcggtctcattccctgtacaactccgttggccggcagatacagaaatgtctgtagcttgtaatatactccaagaacgaatacatacacagccgagtacgcagcaaatattacattaagcactgatataagaatagatggaagtgcaaggcttaagcttgcaggcataccaatagaataaagtctttttgccatcgaaccttctattctcatctccgattttctgaatttaaccggaataggcttaacaatatatattatgatatatagcactgctgccgaagtttggcctattcctgtcgcaagtgcagcgccttcaattcccattgcaggaaatggacctattccgaatatcatcatcgggtcaagcacaatattaactatacagcctgtcataaggcataccatagaagcattcattcttccaactgcctgaaacaccttctcaaacataagctcgattccaagcattattgaaaatgcaaatgcaatattggaatatttaagtcccagtgaaacaatctctgcatcttttgtaaacatttttaagaataccggcatgcccgcaatacatataacggtaagcacaacagcgtgtatacaacttaagagcatgccctgactggctgctttatctgcctgcttctggttctgtgcgcccataaaaaatgatataactgcattaattcctattgcaaatcctatcataaccgagcttataagattctgtaccggaaataccagtgacagagctgtcatcgcattttcacttatcttagcaacaaagaagctgtcaacaatgttgtacaatgaattaaccatcattgagattaccattggaagcgacatttttaataacaatgggagtatcttctgctccttcatatatgtctgattcatattaactacctgtccttttcgtaaaaaaagagccaacaagtggctctttttttaatgatacacgataatatttaattattcaaccagattctttctcgtgatgaatggattgaaaacctattggtgaaaacctactaaacgcctgtgaattctcgatttcgtaggtatattttccaacttaataagttaattccaattattaaacccactcattcattatccagatacattttagtaggcttttcccagcaattattctccaaaagagatgcatttaaactgaaaaaagcatactaaacttgatatatttgcccacttagtaggtttctgcctcttctcaacttataagcttccttctaaaaacctactacaatatcgcgcaaatcaattctagtatgtttctgactcaaaagcccagaaatccaactcacatcacggcaagctcatatcttacttcttccctttctgtgtcagcagaactgacattatcaatgaagttatcggcactgtaagtattatgcccattgttcctgatattccacgcattatctcaattgcaaccgagtacatgttaagaatctggtgcatctggtatgaatatgcgtatattatcatgacaagtcccagacttcctcctgcataagcaagaataagtgtgttagacattgttcctatcatatcacgtccaatattaattcctgcatggaatatttcctttgctgatatgtcaggtctgttttctttaatctcatgtaatgatgatgaaactgacattgcaacatccattactgctcctaacgatgcaatcagtatgcctgaaaacagcataccgcctatgtcaagctttgaattctgacctacatatattagattctctatatcatcaacattatatcctgttacatgtccaaaatgtccgaaaacaagtgctataagacctgatacaaccactccggctattgtaccaagcatagcgccaattgatttcttctgaaaatctgccagtagaataaatgttatcagcgtaattatgacaactgataatgtagctgcaataaatggtgaaacacctatatacatcatcggaatatacatcattactacaactgcaaatgtgaatataagtgcgagtactgaattgaaacctttctttcctccaaccagccacataagtccgaaaaatgctgctaataacgcaattatctctggttcacggtcataattatatacattggctgagagatttccattatattcacttatattagctattaccattgttccaaccttacagttggcaccgtacagatatccgttaagactgtacgcttttacttcttctcccttgtggcttcctgatttaatacgtaaaacaacctcctggctatcgccgctttctaagtcagcggcagcctgaaggtcttcattatcattctgtataactactgccttaacaaacttagtattgtcttttgcaagcagtggttttctttctacactggtgtagaatagaaacatcgcaatcataataagtgccacaacaaggtatttaccaaatgtgtctattatctttcgcaaatgtcttccttctttctgattccaactataacagcgccgatgcctgctgctgcggcagccatacaagcatatactcttgcaagcatgttatctcctgtctgtggagctttgccattatctgtcgaagaattattggttgatgagttatctgctgatgaaccttctgccggtgcagatggttccgttacagtattgttatcctcctgtacagtaagcgcattaattgcattaacaactgcagtttttgcattctctaatgccctggcatcaatcttaggtgcattctctgacttataatctgcaagctgtgcctgtgctccttcctgtgcctgaatgtatattgtcttgtccagaagcgttgatacacccttcttaaatctgttaacactctttccgctctcagacgttgacttgtctgctgcattctttacagaaccatatcctgacaccctgtcagtatccttaccataattatttacgatatctgcaagcattgggtctttgtctgttgtatatgctaccttaatcttctttaatgctgagagagcatccttaagggaattcatgctggcttctgtataattaatctctgtgccgttaattaaagcctctgcattattaataacctcatccactgacatatctgtattagtcttattgattgtaaaatcatcagcatacttattaccattgtagtcatatgtcttgatagtaagtgagccgcttgaaaaatcaattgtcgagaatgatgggaggcatgcattagttctttctgcaatatagtatggtgtatagttaagcagattgtagtacttagaacctgagcctgaacctgttgttatataaagagttccatccggattagttaccgaacctctgcttatatcatagtcaactacatttccatcgagaatctgataacttcttgaaaatgtgtggtcatgtcctgtaagacatatatcaatgttaaattcatccattaatggtgcaaatacaattctgttagtagcagcatctgtatctgcatgtggctgtcctgaaccatagatatcactatggaatattacaaccttccactttgcatcagggttgcttgcaacagcttttttcataaatgttctgtgttcctcctgattacggttgttgctgtttaatgatatgaataacacatctccataattaaaatagaaatcgcttcctgctgctgtacttcctaacttatcctctgaattagggttgttaaaatgtgctgagtaatctgcaccagccatatcgtggttaccaattgtggcagcgattggaaggcttctgaatactgatggataaagatatcctgcatactcactctctcttgtcttcttatcctctgctttagctgctcctgactggttaatctggtcacctgctgataagaggaatgatgcatcaggacatgtctttaatgcctgctgcattgtcttattccagttgtatgcatctcttgcaacactggcatcattagctgatttatctgaactgcttcctgaagcaccaacctgagggtcaccggtaagaataaccgaaaacttatcagttgccttagttgtgtaatcatattcagcagaccatacactgtcatctcctgtgtaattgtctgtgtactggtaatgatactgtgtgttctcttcaaagtaatctgctatgtttaccttattggctgcactgtatgactttccctgccagttctcagcactgatagcctctgcattacctgttacaaccttggctgatgactttgaaccatccttccatacctttactgccggtgttccttttccagctgaataccatgaaaaattaagatctgccgcatctgaacctggagttaaagctatattttcagtctgtgcataagctttttctcctccctgccatacattagaaagccagttctggaaatcagctgaattatctgtatcctgcttgaatgtactctgacttacatctgcctcaccatatgcaaatgcattaataagtggtgcctgacttacaagaactgttgacattgcagcaagtgctgcactttttcttaataaattcttacttctcttcattttttcctccacataatgagatatatttattcgtatactgttgtacaacgaattgtcattactatatccctatgtggtaaacttacaataattgtactgtaaatcttatgtaaaattcttgttgtaagcaaaaaataagacacagatgtttaatgtctgtgtccgattttttcaatttatttgttttcaagctttgtaatacatttatccagcgatgttgcaaaccaatctatatcgttctctgaaaataccattggtggacgaagctttaatatattgccataatggcctataactgatgtaagaatatgctcatctcttaacatctctattacattcaacgccatatccttatcaggtgtcttattaccatcattctttacgaattcaaatcctaagaacaaacctgcacctcttacatcacctactgattcagggtgtctctcctgtacctctttaagtgccttaagaagtgccgcacctgctttcttacagtgttcctgaagattctcatccttaatatatttaagaacagcctgagcggcggctattgatacaggattaccgccaaatgtgttaaagtaaggaagcttgtcgctgaaggctgcaagtacatcctcctttgcagctagtcctgagattggaattccgttacccatcggcttacccattgttatcatatcagggacaattccgtgtctcgcaaatccaaaaaatgcctgtccggttcttgcaaatcccggctgaacctcatctgctataaatactccgccattcttatgtacaacatctactgttgcttttaagaatcctacagggtcaggatatataccatctgatgagaatattgaatcagcaaggaaacaagaaaacttatatcctgcctcatttaattcatctatagtcttttgcatctctgacgcataccatgctgtgaattcttctggtgttccaccatgacggtaataatctggtgctgttataagccttacattaggaagtaatggctgaccggctccaagtgaaggtgaacagcctgatgttaatgcacttgttccgtggtaggcttcctgtgtgataattataccggtaccacccgtataggcttctgccacacgaagtgcaaggtcattagcttctgaacctgtacacatatacattatcttattaatctcatcaggcataagtgcaagcagttcttcactgtaatcaagaattttttcatgaagatatcttgtatgtgtattaagcgttttcatctgttctgtaactgcatttacaacagcagggttacaatgtcctacaccagctacattgttatacatatcaagatatttgttaccttcatcatcccacagataatctccttctccacggacaatgttaagtggctttctataaaaaagtctgtaagcacctccaaggtatttttctctcttactaatcatttcccttgttttaggacttaacatagatgcatattcttccttaaaactgttagagtccataatacttgattctgttgccataatttcctccattctgcaaaaagaaaaagcacagaacctctgatttctcagaaattctgtgctcctttgcactgtcatacagattcattctgtctgacatatataatagcaacatttgtttatttgtcaatttataatcaaatgcttatcaagcatttttcttatttatcttaagttttacagataatgctattaaagccacaacaataatacctgcaagaacccatacacacacaggaacattcttaatgttataacatcttacattaatccacatctgattaattcttgttgtctcttcagcatcaaaatactgcataatggcacttctatccataacttcctgagtaggatactgtgctgacagctgtctgtatgtctgttcttctggaactttaagtatatatctttcatcatcagaatcccctgaaaagaaatatccaagaggataatctacaacatctgtatcactttcatctgctccatagttccactttacatagtcaaatacaacatcactgtcaccacctgatataactgatgtatatccaatataactcatgtttcttacagcattttcaggttttgacagaaagttaataaagctctgtgctgcctgctttttctctgaattgccattaattccagactttaacattacccagccatcaaaataaaggttagtacattcttcaggtactgcaaaattaagctgaaaatcatcctcgtcagcctggtccatagtatatacagcatctccagaccactgataacctgcgactacctttcctgttatcatatcagtcttggcactgtcagtctcgaatgaataggcattattcttaactgactgaagatactcctgaatcctgtccacatttgcctcagaagtatcattcatctcctcggcaagtttttcacgataatcaggactgtttataaatgacgctgactttaacttgtctgacttaattgcaccaacagctgcaaacatggaatctcttacattatccttaatcgttatctgacgtctgaatttgctgttatcaattatcgtccatgtagatgcttctttttctgtcaccttatcaggattgtacacgattcctgttataccccacatatatcctgcagcatagcggctccatgactcaccattaatcttattctcgtcaaatgttttcttgataaatggagatacacccttagcatagtaattattagcaatcgatgtatcatagaaatcatctgaaaatggctcaagccagtcctctgccataagcttcattatcatatattctgaaggacagattacatcgtaatcatcacccagagtaagcatgttgtacagttcctcgttagttccaagacaactgtactgtaccttaactttcttgccataattctcataataccagttctcaaaatcagtaattatcgaattctcaccctttatgcttccgctctcaaggtcaattatatcatcatcactccagtctccggtatcaatatattcttcccagttgcacacacggagtatgattgtatcgtctgctgccaccgctgtaagacggtttgtattaaacactcctgttactgctgctgtaccgcttactatcattaaagctgaaagtattaacgcatttatctttccaataatcttattcatcagctccagcctcctctcgtacagcttttcttgctggtgcaagattaattgctatctcaactacaataacaataaggaatattattgtagataaagcccacaaagcagtcttgatatcagtctgtgaacccttggttgcattaacaacataagtacttattgtgtcaaatgttgcaggcttagtgtatgttgcaacgaaataatcatccagtgataatgtaactgccataacaaatcctgatgctatgccggaagcaatctgaggtattattatcttaaaaagtgcatacacaggtgttgccccaaggtcaagtgcagcttcatacagacttggatccatctgttttaatttaggaacaacagccagatatacgaacggtgcactcagtataacatgtcccacaacaagaggaatatacgtatccttactgacacctaatacaactacaagaagaatacagatagaaaaacctgtaactacatctgcattgacaacaggaacctgattaagaactgacattgctccttttacttttccctttgaataaaatgcacctatagcacctgttgttccaagtattgttgcaagtacagcacttccaacagcaagcagcacagaacctattatcatattaataagctccggagtcgtaaaaagtgttacataattatgcattgaaaatgcatgtattgctcctatattagcggcatccgtaaaactgtatactgcaagcacaagaattggaatatacatgaacaaaaggacaatgcatataatcatatatttcagaaatttcttcattatacaagtcctcctcttccagcattttctgactctttatcacccgaaaccagagtgacaatacatataataacaagaagtatcagtgctatcattgagccattgtgccaatcatatgcactgaaataacttccaatcagactacccataatatatgtgctgttataaagcatatcaagaactacatagttagtcattgccggaaggaataccattgacacaccactgacaattcccggaacagacaatggcagtataaccttgataaatgtctggaaattatccgcaccaagatccgatgctgcttcaataacactcttatcaagctttgaaagcgttgtatataacggaagtatcatgaatggaagaaaatcgtatgtcattcctattatcgtattgataaacggataatacgcaagatttccctcaatcattgataatatctctttaagtgcggtaattcttaatgtgaaattaatccacataggcataacaaaaagcagaagtattaccgcttttctctttaacttactctgtgaaagtatatacgctacaggataagcaattataagacagactgcagttgcaacaaatgcaagtacaagactgtaacacagagttccaagtgtattagggtctgtaaaaaaattctgcagattaaccatgctgaattgtccctgtccgttagtaaatgcataatatacaaggacaagcagtggtgctgcaacaaataatataagaaacagcccataagggattccaagatatttgcgtgaaaaagacatatttctatccccctacttcttcaactggaatttcatcttctcttcaggcatgataagaccaacctgatcatccatattccagagatattcatcatctacaataaggtcatgaccatactcagttcttattacataactgtaatggtcacccttatagataaggttaataatcttacctgatacaagacctgctgttacatcatcgctcatttcaatatcatcaggctggattgaaacaacaaccctgaactttgaaacatctacattttcaccgttctcatcaacaagcactccatctgacatcttagtcttaggaataacctgtgttaaatcacagcttattatcttgccattaaagtcgagcgtataatctccattaattgttgtaacaaaacttgtggtatgatcctctgcaatcattacatgaattccatcaggctcaagctgcattcctactgtatcaccgacatgataacacctggtagttcttattatcatctcatactttccggattcaacagcaacctcgtaatgcattcccttgaatataactgaagtaacctcaccaacaacagttccatcctccggctttgtaataattacatcttccggtcttataacaacgtcaactaaagttccctctggaacatcatccattccgacaaactctccgccacagaatcttactttcatgtgtcctgtcataatacctttgaaaatattgctctctccaataaagtcagcaacaaaagcattcttaggctcattatatatatcctcaggagttcctatctgctgaatcttaccctctgataagacaacaatcttatcagacattgtaagtgcctcttcctggtcatgtgttacatatataaatgtaattccaagctggtcatgcatattcttaagctcaatctgcatctccttacgcatctttaaatcaagtgcccccagaggttcatcaagcataagaatttctggctcattgacaagtgctcttgcaattgcaattctttgctgctgtccgcctgacaacgtagatatctttctgtcctcaaatccttcaaggtcaaccatatcaagaacatgcttaaccttttttcttatttcttctttaggaagcttctttaacttaagtccaaatgcaatattttcatatatattcatatgtggaaacagcgcataacgctgaaacactgtattaatcggtcttttattagctggaagctgtgatatatcttctccgttaagaagtatctgtccgtctgtcggaagttcgaatcctgctatcattcttagtgtggttgtctttccacatcctgatggtcctaaaaatgttacgaattccccacgctttacttcaagattaaagtcatcaaccgccttaaatccattatcactatataccttactgatatgtttaagctctattatattttctgatttaccagacatatccaacctccgcaattaacatccttcattacaccgtctaacaactatgcaaccacttcctatttaatatcaaaaacgggtacaaatcaagtgatttcttgatttgtacccattattttttcaatgctttttcattatgtaaaaaacgataaaatatgagttttatggtctgtgatgaagttcctggactgtcttgcttaattcctctcttatagcttttctctcttctggaatctttcccatacgctcaagtaaatccgctgtatcatgctcagaaccaacttttcttaacgactcacatgctgcaaatacaacatcatcatctgtatcatcaataaatcttaacagcaagtccacactggtctgatcatcacttgcaccaagagccttagctgctgcaatcttttcttctttacttcctgtaattacttcctgtatagcataccagtcatggtgctttacatatttctccattttttcatctaatgtctttttcttaaataacataccgatgccttctttcatctttttctatattatagtattgcattttcgatatgtaaaatgtatatttaatatgtcacttatatcataattatatattggagaattactatgaccttagattattacagaatattttactatgttgcaaaatataagagtttttcaaaagcagcccgcatgctcgacaataaccagcctaacataacccgctgcatgaatatattagaaagtgaacttgactgcaaactgcttaaccgttctcacaaaggcatcactcttacacctgaaggaaatacattgtattctcatgtatcaatcgcaatgaaacagcttgaagacgctgagaatgccattatcaaaagcaaaagtctgtccgatggtacaatatgcataggagtaagcgagattgctcttagaatattccttcttaaaaaacttgagaaattcacagaactttttcccgatgtcaagataaagcttaccaaccactctactaatcaggctgttaatgctctaaaagccggtctggtagactttgctgtcgtaaccacacctgttaatttaactggcgatatgaaatctgaaagcctatgctcattccatgatatacttattgcaggtccaaaatacagtcagccagataacaaaataattcatctggaagaattgcaggattatcctttcataagtctggcagaaggtaccggtacacatgaccactacaccaaattcttctatgacaacaatcttcactttaaccttgacctggaggcttcaactacagatcaggttcttgcaatggttcaggcaaacttagggcttggcttctatccggaggaacttgcctctgaatatataatgcgtggtgaaatatttcctgtaaatctatacgaatccgcacctgacagagatattgttcttatacgtgaatcaagacataccgaaagcattgcagccaaaaaacttattaatttcttaaagcatacaactgattaaaatgtcttagttacgcattcaagtgtcgcacagtagcctgtattattcttgctcttatacatggcactgtcggcacgtctgtacagttcatcaaaatcaatatccttttcccctttataaaacgcttcacccatgcttacatatatcttctcatctcccatctctggaattcttatgtccttaagctttgcaaatactctcatcgtgaagctttcagcatctttagtttctgttattcccgggatgaacattgcaaattcatcacctcccaggcgcatgcatatatcatgttccctgcatacactctgaagacttcttgcaaccgctataattactgcatccccgacaacatgtccatatgtatcgttaacattcttgaacttatcacaatcaagaaggcacataagccccttagttccttccttaataaggtctgtaattgctttctctccgcttcctctatttcttattcccgtcataaggtctgtttctgaaagatataaaagcctgttctccttacgtttctctgcatcgataacttcaacggcatatacaacatgccacagttctccgttgctatcctcatctacccttatgaatctttcacgacaccatccagagtaatttccaaggaattcatgaacaatcgtagtcttgttcttcattctctccggaagtgttgatatatcaacaaattcaagtacactttctacatacttcctggaaggaagactcttcattacactatttatctgttctgcaaaagtatgctcaccttttatcatattatcccttatgaaatctgttgactttatttcatgaaattttcctgtctttaaattgataatatgcattgacagatatattccggcaagtgctgaatatgcgctgaacatagcctcacgcttggattttttaaatacatttctctgttttaatagcagtactaaaaatgtgcctatcatatcaagaaagcgcgaaatctcgtccatctcactttctggtggattgtcaacaccaaagaagccatatatctcgtccttatatctgaatggacttactgccaggctctttacattctgaactttgagcagttcatatgctgcaggatattcatccttaatctcctcaatatccttagtactaatatttcttccatcattaaatgatgtataccaccagtctataattgacatatctacattctgaagaaactttatctgaggctcaatcccatccgcacaccactcataagtattattagtaaccttttttctaatattatcttcaaatatgtatattctttcagacccgatatgttctccaaaaaatctgataaattcattaatctgatcatctggattttcataattcattgctgccttcattgctttattcataattgattcgtactttttcgtcttcatatgcatctccaattcaatacatttataactagcaacatagtaacatatatcgacaaaaaacgcacccttttcacatgtaaaaactgtgaaaaaagtgcgtcctgatattaaacaaaccgcattcgccgctaataattctctacatagccttaattgcattcactgttatattgtactgtttctcaacttcttcaaatgcttccttagctcctgcaagttctcctgcacgaaaaatctctgtaatagctgaactcgccttataaagattatcaaacccaagatttaagcatactcccttaagtgtatgtgctgccctgaatgcttcttctacatttccagcagctatagcctctttcagattggcgtagctgttgtcatctaaaaatttcaatacaaattttttaataaaagcctcatttggaaatctattcaaagtattctgataatctgctcccatcgcatcatagcattctttaattgtcatgtgcctacctgcctatatattgttaaattataactatgcatataatgataaatgatatcacgattaatatagtattgtcaaagaatgatttaataataaaatataatttcagataattattttacatatccgcaaatatactgtatattaaatatattgctgtctggcaaaatatatgcgggggaattgttttatgaacaaacgagattcttttaacaacaaatggggattcatccttgcctgtattggctctgccgttggtatgggtaatatctggatgttcccaacaagagtatcaatgtatggcggtggatcatacctgataccatatttcatattcgttgcacttattggtttcactggtgttatcggagaaatgagttttggtcgtgctactaagtcaggacctgttgatgcatttggatatgcatgcgaaactaagaataagagaaagcttggtgaggctatcggctttattccagtacttggcgcacttgcaatggcaattggttacactgttgtaatgggctggattcttaagtacatgattggagcttttacaggaaagacacttgcatctgctgacacagaaggctttgctgcttcatttggaagtatggcaagcgcatttggtaataatgtatggcagattgtagctcttgttattggtattattatccttatgttcggtgtcggacgcggaattgaaaaggccaataaaatcatgatgcctgttttctttattctttttgctgtacttggaatatatgttgctttccagcctggtgcaatagaaggctacaaatacattttcagagttgaccctaaggcatttgctgaccctaagacatggatattcgctcttggccaggcattcttctctctttctgttgctggtaatggtactcttatatatggttcttatctttcagataatgaagatatccctgctgctgccggacgcgttgctctgttcgatactatagcagccttgctcgcagctcttgttatcattcctgcaatggcaacaaccggtgcccagcttaatcagggtggtcccggacttatgtttatcttcctcccggcactttttaaatcaatgccaggcggatacatagtcgcaattatattcttcgttgctgtatttatggcaggactttcttctttaatcaacctgtatgaagcacctattgcaactattcaggaaaagcttcatcttggaagaaaggcatcttgtgccataatcgctgtaatagcacttgtagtttcaatatgtattcagggaattgtctctggatggatggatatactttctatctacatctgcccacttggtgcaggtcttgccggaattatgttcttctgggtatgtggtaagaaatatgttgaaactcaggttaataccggtcgcgataagaaattaactgataaattctatcctatatgcaaatatattttctgccctgtatgtttccttgttcttatacttggaattgttcttggcggaatcggctgattaaaatattataataaaaggaatcctgttagcaggtaggtattgcctttctgcttatgggattccttttttcatatatttaattatgctattcatgctttgcatcacattttttacaggaatatttcctcaaaagcagcaattacaagcttaagagttgcttcgtccatatccgaataatgaattacaagtattccgtggtacttatccgcatcagcgaaacaatactctgaaaggcagttaatcagaatccccttctgcctgactgcccatttaatctcaacatcacttaaggaagtcttcacatgcagcaggaaatgtgttcccgcatcgtcctgatatatcgtactgatttcattaagccttgattcacgaaacatcctgcaaatcttttcacggcgtcccctgtaatcattgacaagcctcttaatgtggcgctcaaagtatcccttctcaataaatgccgccatcgcatactgttcaaagcccgacaccgtacacgaataaaaattcattgttgagatatatttttccatcagcttttccggcagcaccatatatcctattctaagcgaaggaaccattgtctttgaaaatgtattcatgtatattaccctgtgacttctgtctctcgactgaatggacggaattggtttgccctgcatacggaattcacagtcaaaatcatcctctattatatatctgcctggctcctccgccgcccagttaagcagttcctgtcttcttgcaaccggcataacaaggccaattggaaaatgatgttcaggacttacatgcgctacatttatgtctttcattctaagttcatcgactttcatacccttatcatcaatattaacataatcccagtccacaccattttcatcatatatcttggtaatcttacggtatccgggattctcaacaccaaacttcacatctggacctaagagctgtaacagcctgttatacagatattccgttccggcccctataataatatggtctgctgaaacctgcattccacggtatctgttaagatggtctgcaattgcttcacgaagctgcagcacaccgttaaaaggtacagtcttaagaagagaagtgttataatcagtcagggtttccctcataacctttgcccatgtagcaaatggaaatctatcataccggatattatttgccgtcaaatcagcaagataagtctcctcctggaatcttttcacaggagcagcataccctggtgcaccacctgtaaccacggcaatcttattaacataataccctcttttttcctcagatcggatataaccttccagaagaagctgctcatatgcgttctccaccgtcttgacacttatctgcaaatgctgtgaaagccctcgctttgatggcagcttctcatcagccttaagcttcccgtcagctatatcttccttaatcagttcatacagatattcgtacattgttttgtttccgcgtttatctaaatcatatgtaagcaaatctggtctcctattatatatgtgttttggatatttaaaagatatcagttttaattataataagctcataagcaaaaaacaaggaggaaaatccctctcctcacctgaagggttcggatttttcttcgaaaaacaaggaggaatagaaatactatgggaatctatgctattactggtgcctcaagcggtatcggtgcgaaaactaaagaattgttaatacagcagggacataaggtaattaatattgatcttaaagacggtgacatctgcgtaaaccttgcatcgcaggaaggcagacagtctgctgttgatcagttacatactatgtgccctgacggacttgacggaatgatatgcaacgctggtgtttcaggtgcatgcggtaatctcggactcattatctctcttaactacttcggaacagtagccgttgcaaatggtgtatatgaccttttaaagaagaatcacggaagctgtgttgtaactgtttctaacacaatttcacagggtgcaggccgtaaggatatcgttgatcttcttaataacatcggtgatgaaaagcgtgtattaagccttatttcttctatggacagcactaacctttcagtaggaaacagtctttatgtttctactaaatacgcacttgcaagatgggtacgccgtgtatctgcaacatgggctgccaatggtgtccgtataaatgctgttgctcctggtaatgtacacacagccatgactgcaacaatgagcactacagcaaaaatggctcttaatgcacttcctatcccaaccaagtacggtcaggagtgcctcatggctccagaggaaattgctgaggttatggtattccttgcttcagattcagcaagaggcgtcaatggaaatatcatgttcgttgatggtggaacagacgcattattaaacacagagaaagtatattaattaaggagggcattaaacatgacagcaattgaaaaatatgtagaagcaatggaaaacaaagattacgcaggacttgccaatctcttttctccagacggaataatcaacgattattgtactaactcagcagcccagaacgaatatcatatatatggacgtgaagctatcaacatgttcttccgtaacaagttcggcttccgcaaatactctatcttagatggtgaagttgtgaattctacccaggcagaattcatcgctaacttcggcggttacaacatcatggccatcgctacagtccgtgaaataacagaagatgggcttatcaagagacttacagtaagacctaagtaattaaatattaaaaatcgtgtataaccaatcagggcatttgaattgcaagttaatcccttacaatccaaatgccctcatttttctttttaacataaacaataaacttttcaagagatgccttttctctatctcaatgtccaatctgtcactttctcgcagtcgatttggactttcacttaccttctattcgcttctaggtccaatcgagtatacccgcgcggactttttggacatccacttggctcttgaatatattcaaccctgtattttaatacagattgacctgtttttccacaagtctgctgccttcatacttaagctttatcgagaaaaatctctcctcccccgaaagaagaaggttcagaaataccctgtcaccctcccatgtcggaagcccgggaacttcttctttatcaacccaagccagttctccttcatcacattcaataagctcacctgtaaagccatctgccgtaaatacacacataagctctggctcacattcattacttataaatgttacaagtccgcggaatctgtatgaagtaagcgtaagacctgtttcttcctttacctcacgcacaagacattcctcaggagtctcctgattctcagcatgaccgcctactccaatccatttaccttcattaatatcattatgctttttcactctatgaagcataagatacttcccgtccttctctatataacataaagttgtagttatcattaattctacctttcatgtccgattttttcaatttcataatttctgcatacaacattaataccttcagtcttaccccagtcaagacttacatacactttcttcttatcaacatcccacttaagttcatcaatagttattccgcatcttgtacgaagtcccttaaccattccgcttccaagcttgtctgaccatgccggaagcagttcaattgtgtgttcgtccgaatatacaagcatttcattaataattccaaccagtccaaatgcagtatctgtacaatatacacctttgctcctgtcagtattgtggtctgtaaataaagttgtgtaaaatatgtcactgtgtacaagcagattaagcgtatcatatacagcatctgcatttttaagacgagcctctactaacgccttatgtatccagccatgtgaagcggtatcatcttttcctttattctcatggtttctgttaatgattgcctgacgacacgcagatgctaacttactgtcatgctgagtctgcaaagccggccatgccggataaagatggcttatatgcctgtgagcattattctcgccatactccttcatagaccattccttaactgcgcctgactcatcatacataaaatcaggtaacattcttaagagtgcttccgcctctgatacagcctgctcatatccatcaaccttcgtataattaagcatctccgtgtacatattaattacatctttagccgcagagatatccattgctgcattggcagtaatcgcactatgatatccaaaaggcttattctccggtgaaaatgatggaataataagataatgctcactctcattaagactgcatttacccttctcataccttgcattaccgtctgtatctgtgtaatactcaggatttccaatctgtttccagaaattataagtctttttaagtagtggctcatatacatcttttcttacatcaaatgtatctttgccgtacatcttaatcagcgccacatcatcagttgttatcacagcgtcaccgtaagtctgtaagaattcatatataggaataagcatccagccagcaccggcattccagtactggaatggataattaatatcatactctaccatcattgccctgtgtccatcagtattaaccggaataagcactgcatccttcattccatacaccattgccgcattgttaacccagtcaggtatctgtcgaagtataaaccacatataaccagcacctgcttcatacaaccctgagctgtttattcccgaaacctgaatattaacattggcatccattgtgtacgcacttctccacaacagattccactcaccaacccacaagccgctgagtcttggtgctgtcgttcctgcgcatgcctgcattccatacagaccattataatataatttttccagcagatgaggcataatgtcatattcttttttctgcaagtcaagcagttcttcattagcagactcacaaaaatatccgccgtcaagcttaagctctatattcttatgttctaagcttaccggttcttccgttatatcgacactgttaactttgttaatacatttgtctaccagtgcaaatgtatctttgccattaactctgtccctgaactcacaatattcccccaaatcatctgtccagtctgtgtaagttataagtgttatgctctctgcatgtgatatattaataaccggcgcagtctcatcaatgcaagtgtacgcccggctgtctttaggctttgatgaaaccctcatatcaccatctgtcaatatccttgtaacacctgcaaatccaccctttgcaagctcacttccctcatattcaggataatgcacaaccgtacctattatgttacctcttacaaatcttgaatacagcatatttctttcaggtgcaggaatattgttcttctgaactccgaatttcggcatagactcaaaatcatctattgatatcgacatattcacagacttttcagatattattttagttataatcacattctgttttctcgatacatatgtactttttgaaacagaagctccgtctgatttaaatgtagtatttattgtaccagtcttataatctgtccatcttctgtaaccagaaatatccggctctccttcaagtgtcagtcttatcatatggcctggatgataacagtacatattcgttctttttctatcatgtatattccatgtatcatcaaaattaataactgactgtctggcttcatctaactgtgctgtaacatcgtaaggcacatgtcttggctcttccgatggcatgacaaattcaacattctgatatataagactgtcctctataggcgcacatgattcaagcacgccaagccttccattacctgccaccatagcctcatgccatggtacatctgtgacattataattatcgtaaggtttaatctgcctaaacttctttgaaaatgaactatacatttttagacttccttttctacttatcttgtttttcttctttctcttcagttccaaatgatttagcataaagaaacttatgtgttgcaaataatcccgcaattgcagccaccccagcaagtacctcaaaacctgatacatgtcctactatcatctgtcttgaaatagcaaaaagcagaacttcaataaccgtacctggagtatgagtgcaaagcatctttacaaactcaactccaattgcaaatgtcataacattctcaaggaaatactcaagcgtggcattatcacagcctattcccagcacgctttccacaataaatttccctgcaagaaacattataactatcagtaaaaatgcagataatacaatctcaacatatgaggcagcctgctgcattaattttcttaatttcattttcatagggtaaactatcctttcaattaattttatatatagtgccttatttaagcattaattatatcttattcttaataattaagcaattgtgcccctatcgctttcattaaataatttaacataattatatagtgaatgtgcataatttcatttgactttcataatgttttttagtaaactttaacaagttggtgttttgaagtatgataataaatgacgccatatttattatctctacaggcacgcgtaacggacataattttttaacgaggagaaaaacatggaagctttattaattctagtcatcgttgcagccctgcttgcgctcggctatgcagcattcaacttcatcggtgttaagaaacttgatgaaggaacagaccgtatgaaagaaatcgcagcagccataagagttggtgctaacgcatttattacatacgagtataagattattgcagtagtagttgttattattgcaatcgcatttgcagctatattcactgtccagtatggagaattcagctgggagccatctgtatgtttcatgattggtgttatcatgagtgcatcagcaggctgggtaggtatgaagattgctacttacgctaatgtaagagtttctaatacagcccgcaacactaagaacattggttcaacacttaaggtagctttaaaaggtggctcagttatgggtctctgcgttggcggtttcgcacttttaggacttttccttgtatacatcatatttggatttggtcttaacatgcttgacattgaggcgctccgtggtgctcatgtattcacacagtgtctttcatgctacgcacttggctgctctattgttgctatgttcaaccgtgttggcggcggtatatatactaaagcagcagatatgggagctgaccttgttggtaagacagaagcacacattcctgaagatgatccaagaaaccctgccactatcgcagataacgttggtgataatgtaggtgatgttgccggacttggttctgaccttcttgaatcatttgttggagctatatcttcagcaattattcttgcagtaagtctttacctttcaaatgtagctaataaccttgaagtttcagatgatatgctttctaagatgatgtatttcccacttgtattcgctgcaatcggacttatcgcatctattcttggtattgcatatgttctcttaaagaagggttccgataatcctcacagagattttaacatttctacatggagtgctgccggaatcactattattggcggcttcgttgctacttatctgttattcaatggcgagaatgcagatattctcaaggttgcaggatttaacattggtttcatatcaccttggattgctgcttcacttggcgtagtgagtggtgttatcatcggtggtatcgcagaatactatacaagttatgattacaagccaacacagacaattgcacaggcttctaaggaaggtgcagctttaactattacacagggtctttcagttggtatgaagtcttgtatgtacccacttattgttttaggtattacaacttatgtttcatacgcagtttcaggcatgttcggtattgctatggcggccgtaggtatgctttcattcgtatcagcaactgtttctgttgatacttatggaccaatctctgataatgccggtggtattgcagagatgtcagagctcgaacctgaagtaagagaaattactgataagcttgattccgttggtaatacaacagctgccatcggtaaaggctttgctatcggttcagcttcacttgcagcactttcacttatggttagtttcctttatgcattccagccagagggaagcaacctcgaccttaacttcactaacccacttattcttgccggtgctttagttggtggtgctcttccatatctgttctcaggtatgcttattgaagccgttgccaatgctgcccgtaaaatggttgaagaagtaagaagacagttcagagacattcctggcatccttgaaggaaaggctaaaccagactataagacatgtattgagatatcatctcagggtgcattaaaggaaatgcgtatgccagctatcatctcaatcatcttccctgtaattgccggattccttttcggaccttacttcgtaggtggtcttcttatcggtgctactctttcagctatcatgcttgccatctttacaggtaacgctggtggtgcatgggataacggtaaaaagtacattgaatcaggtgctattgaaggacagggcaaaggctctccagcacatgatgcagccgttgttggtgatactgtaggtgatccattaaaggatactgtaggaccatctcttgatatccttatcaagattatgtctactgtttcactcgttgcagcagtaatgttctacaactacaatctactttaccttatctttggtataaaataatattccatataacggaattggggcgacagaccgattggtctgccgcccctgtttttatgtatatttacttaacaagtgcttcccagcgctcctttggaattgaactgctcgtcacaatacattcagggtctggtgcaatgacatgccttacaacttcaaacaccgcctgtgcatcacacagcaggctctctgcgtcaccaaatgtcacttcacgcacagccttacagtcaagaaatgcctgattaagcttaacgaaatcctctgatatgtgaggctggtctgcgttgtaatgctttctcatatatgaatccttaatgctgccatcaggcattacaatctgtaacttcatcggcttatctgataatctgtgtggtacattaagtacctcttcaacactatgaataaatgtattgcgctcatgtcctactccaacaagcagaacttttcctccacagcttcttaatctgtcataacatccgcctggtgtacacggtgtattgttattctcctcacccgccagatattctgccgctttctttccaattcctgccatgctgtgtgtaggatgtagtgaccttattactccatctcttttaagaaacatattagtaagcagtccaacacatgatggtgtttctttaggattatatactggtgagtccgcatttatattcttccatgtatgtgttggaagtagtaaaagtccatgtccgaaatattcaatccatgcatcaagcactgtatctgccccgccttcaacttctccgatagatttcattgatgaatgaataagaattgtttcctcgcctgttaagcccatattctctacctgcttctttaactgttcttttgtatacatattagtcctcgcttttcacatatcaatatagtaaccatattagcacatttatccttgaaatatccagcaaacaatgcaataattacttttgaataatttaattgaaaggaattaattcatcatgactaaaagacgattgacacgcagacagcgtcaggtaagaagaaaccgtattattctcgcctgtgcagctgctgctttacttatcattattattgtaataatatctgtttccatgaaaggctgttctaagtctaagaaaacagataagaatggggaatctacaactgccaaggttgaagaatcaacacagacaaaagagaatgaaaatacaagtgaagaagtttcatcaactgatacttcatcttcaattatgtcagatgcaacatcagtctctgcttcatctgacagttctgaatttgcaccacctgtagttccatctggtaatacagtttccaaaggtactacttctaaaggcttccagattcaggaaattaatggagcaacttatattgacggagtacttattgccaataagacatatgctcttcctcaggatttcattcccactaatcctgaccagcctgttaatgcagacagaagttcaacatgtcttgacaaaactcttatgagcgcatggaacactatgttaaaggatgcaactgctaaaggtcttaatatatatattgccagtggataccgttcatataattatcaggttaatgtatataacagatatgttaaaagtgatggtgctgctgtagcagacacatattcatcaagacctggcaactctgaacatcagactggtttatgctttgaccttaacactattgaagacagcttccagtacactaacgaaggcaagtgggttaatgataactgctacaaatacggtttctgtatccgcttccctaaaggaaaagattcagctaccggatatcagtatgaatcatggcaccttcgttatgtaggcgtagaccttgccactaagttatataacaatggcgactggttatcacttgaagagtactttggaattaccagtgagtatcctaactaagattaaaaacccactaaaacgcattgacttgctgttttagtgggttatttctcaatttgcaattctacaaccattggaataaacctacacaattgaataaaagtaatgcatttgtaggtttatgccaactcaatcgttctttatgcctgacttcagtacttatctttaattgtaagatgataaagcgaccttaatcaaagcaaaaaatcaaattctattaacaaatttttttacaatcaccagacatatcagaagctctaatggcatcaacactataaaccacaatgattccctaatacattcatacatgcatatctttacaagctgctctttctctgcacctgtgtcagaaagcagtttcagcctgcttctgtacttttcaaggcggttctttacaattatcatgctgactatcatatatattataattgctgcaaatgctgttacgccatatgacataagactttctattgtacgctgtcttaacagattcttttcttctgaatatgatatggtatcaaagcccgctgttttcagatatgaacggaccacattgtctgttgctgcaaatgatgacttaagattatatcttatgttaaactggttcggtcttaacttcaaggtaacataatctggaagttcatcaagaaacagatactttttcataacattattctgattatccaatgctttctgtaaaagctgtgtagaacctattatcgtatactgtccaaactcaggcacataatacttaagcttgtcccttatctcatcagttaatattataaccttagcaacattagtactggctgccggttccaataatgaataatatgtatacttgctataccatgaacccagtacttcacctttacatgaaagattctcaaataattcttcttttgatacttcacctcttttatatgccatatataaatcatagttggcttttctgtattcataataatcctgatcaaagtcatctgtatttaaatacatattataataatctgttggatcatcatatgtgtgtcgaagatattcatcaactatttctataatctgctcccttgaaatattatcacttatgtattcatacatatctttactgtctattgtatatctatattctgatataagatccgtgaaaaatttattacatgctacagtatatttatccatgtagaatgattttatattataaaatggatttcccatataatagttattaaggttaagtgtaacaccatctttcatagtatcatcatattcaccattattatctgcattaagaaagacaacactctgtgttccttcttttaatgcattgtaatccagcttaccaccagcacactcattaagtatatcgaatatttctttatctatatctacatactcgcctgcaaacatatattttctgttttcactggagccgccttcagtctcacttcctacaccattcgtagtaatattaatattcatattatcccatgtaaatgatcttgtagtttcgtaatacccataaaagatatcatctattccttcaatctgctttaaattattaataatatcatcattagcagaattatatatcccgctttttcctgatttaaatcctgaaaaataatacgcccgtgcactgtgaccatctgctatattaaattcattacaaccgggaattactctactgttctcagtatatcttattccattctctatctttattaattcatgtaaagaatcataatatatacatggaacagttgacacattatcaaccatgtaattgacacaatctggtgtactgcattgctctttataattaccatatgatgtaactattcctataccgcacaatactgttataactgccatgacaaatgaaaatacccttaccagaatattaacaataataccattagttctcattaatcttgtcgctgtgttgattataaaattctttttcataagattaccagtaattttaactgtacggttacttccttgttttttcttatgacagccagacagcaatatgctgattatacttaccacaactgagataaccatcattattattacttttatgtatatatctttatctattctgaaaaatgtaactccttttgtatgttcaagtacaagacatattacttttcctgctcccagcgcaatgcagcttcccgctattgctgatattccaagaatcactacattttcaagaaaagtaataattatcgtctgtgcacttgttgctccaagagttttttgaataaatcggacattgtttctagacctgttatatataataatctgatatgtgactgctacaattccaataatcataatgagcatatacatgtatctgtttactcgttcattatcccatgactgataatcatatacaccgctgttataagctatgttgttccttatgccactttcactggcaatacactgatacattgtattatagtcagtctcactaatgaaatcacgcagcctgtatgcatatatatatgttatctcgtctgctattacatcagcctgcgtatctgtgactatcacgcctggcagacggtttccgctctgccatacattagtataactattaattatcccgcaaattgtatatgtcgtatcatcaatagtcagaatatcccctatattcatcccctgtccaagctctatcaacgtattcctgtcagcagccacttcattgtccatctcaggcatatgtccctgttccattgtaatgcttcccatttttatgaattcatctgacattgtaccaaccataatcttatcagttgcagaaatagcttctattgtgttgtcggaatctacagaaagcggttctatacttctgacagttactgctgtcactgcctgttcaagatatgggtgattcttaatcacatcattctcactcttattggtgctattataaaacataacaaaccagttgccaaaatgctgtttattaatagctgtctgccacttcttcatatttcccgaatataacagaactcctgtaacaaacataaatgatatcattaccaccgcaacaactcgtactacttctctccagcgtctgcaaagtcccttaaatgtcaatgcaataagttcgctgttcatacaccaaccccccctgtcacattgccatctgtgattgtgagtatgcggtctgcatattctgccatctgcctgtcatgtgtaaccataacaatagtctgctgatacttagacgctgccagagtaagcatttgggcaactgtttctgcacttgccgcgtcaagatttcctgtcggctcatcagcgaatataactgaaggatgggtaattaatgcccttgcaattgcgactctctgctgctcaccacctgacatctgtgcagggaatttatccttacaataatctatgccaagtgattccattaattcagtaacttcctcctcatcatcttcctcactgtcaagaattaacggaagaattatattttcatatgctgtatattcaggaatcagcttataatcctgatatatgaacccaatatgcgtgcgtctgaattttgccagttctgaattcttaagattacttatgtcttttcctgctatgtacacctttccttcgtctggcttgtccattgttccaagaattcttaacagagttgacttgcctgaaccacttttgccgacaatcgcggtaaatcctccctttcttacctcaatatcacaccggttcaacgcattaatcttcacctgtcctgctgtgtaagttttggatataccttttgcgcttaatattatgtccatacgtctccccctctcatccccgatttctatctgggataattatatcttacaaaacttacacccagcttacatggactgatatttcgtctttaatctgtacatcggaagcgtcacaacaaactcagctccgccatacttttcactgtttcctgcctttatgcttccatgatgtgcctcaataataagctttgacaggttaagtccgatacctgccttaaaatccgccgcactgccattagtctcaaatctattgaatatgctgttaaactgctccgtacttaaccctttgccattatcagcaatcgtaactacgcagtcatcattctttcttgtcacatcaacatataccttagtattgtcatctgctaaatattctgcacaattgtcgagaagattaatgaaacactcgacaatccagccttcatctgcatacatacacaatttttcgtcaccataatctgtaacaattctatttctgtctacaacactgctgttaatgctttcctgaagtattgccgcaacatcaacctcatcacttgtcataacaacttttccagcctcaaagcggcttatgtcaagcagcttctttataaatgttttgattctgaacgcattacctgtgcaatcagctatctccttacgccgcggactgtcatcacatttttcctcaagcatttccagtttcatagttataattgccagcggcgtcttaatctgatgtgctatattttcaataaaatcctgcatcttcctgtgctgttctttattataaatgtgttcgttatctaactgcttagaaagcctctcgttatctgcatatacatcgcacactttctttacaaagcccttatgtccaagtctgtaacagttatataatcctgaaccgagtgcaattaaaagaaccactattattgcaattaaagcatacatttccccattaagtctgctcatatacgaaaagccatggctgccgtatccggcactttccatggctgtcctacccgctctgatattgttatctgttatccctgatgaaaacatttttcgtacaaatgcttcaccgtatgcattatcctgtaaatacaatgcacctgccagtgcctgttctttaagccggtaataagctataattccagctataacagccacgttaatcaatccatatataataacgaaaacagtctgcctttttctgaatacagacagtttcttcttaaccgtgttatccataaatccccctgaaagttattagtcaatccacctgtagcccacatttctgatagtctctatgtattgctgatgtttctctccatatgttccaagctttgcttttattctgctcattgcaacagtaagcgtgttatattccacaaaattaccgtgaatatcccatatttttcatatatagcatcacgccttacgactctgcctttattctctataagtattcttacaatatcgaattcattcgtcgatatattcaattcttcgccacagcggcttatcttatatctgtcaaaatcaacgacaatatcgcccttcttatagatattgtctgcattgaacttgcttcttcttaagttggcacttattcttgaaagcagctccttcgtataaaacggctttgttatataatcatctgcacctatatcaagccccatgactatctcttcctcattatcacatgaggttaagaatataaccggcacttcgcttgattttcttatcttcctgcatatgtcaaatccacttccatcaggcagcttgacatctaacagaaacatatcaatctgtggattgccaatatatttatccgcttcatcgcagcttctggcagtaactatctcataccccttctcagtcagcagcattttaaggctttcacataattccttctcatcttcaacaacagctatcataatttccgttccttttcacatatcctgtcatactgcttatacattttctgcacctcgttttcaagcagatagtaatgcttgatgtatggaacaagaaggataagtattgcaattgcaaggacaagcagaggcatgcttaatgcagagtctatcgcccctactatcacatatgcgcacactgtcagcagctccaatattgcaaatgttatggttacaatcaaatgcacaagcctttcatgctgaaagaatgccacctgtgtaagatgctcctgcttgatgtatttccagtcgcacccttctcctgactgtaacaatgaatctatgtattttctgtatgttaaaatacggtttttcatggtcagccttctttctttaaaatgtctatcttatatttcatcatctacactatttagtaaacaatcaaaatcactctgatataaagaatcctgaataaccctgtatttctcaaattcactctctgcaaattcttttgctatcgcggctgtcacctttcctttatcttgcaacacatcggcatcattaaatctaagaaatgcatccagcttagtcttccagtcttccaagatgtaagccccatatgttctttattatgatcagcccttgcagctatcacttctgctgccgtatttccatgtacagcatagtgcatcttattctgaactgtcgcataaaactcctttgttactacagaatttttatcataatcaacagcagttgcatatatatctgtaatcttttgataaaacctccgttcacttgctctgatttcttgaatttcagctattaaatgttcaaaataatcttcatcaaaaatctgaccattaatcagtctgcttttgtctaacacatatccctgttttgtaaatgcttccaaaacctttgtcgcccaaactctaaactgtgtcgccctttcagaattagttcgatatcccacagctatgattgcagccaatgaataaaacttatacttgtattcttttccatcatctgcagtttgtgcaaattttgcacaaactgaattttcatcaagctctccatctttaaatatgttacttaaatgctttgaaacgacacttctatcaacatcaaaaagttgtgctatcgccttctgagtaagccatacatcattattctgcactcttacttcaattccatcatctcctgcatctcgggtaaataccagaaaatccactgtactatttcttatttgtattttttcgctcattcagacatacctttcttttctatattgcactaataagaagcatatttaaactaccttcccgatatcgcactcttaaaccatcttcccgtctcagacaaatcaccatcactccagccgctcttggcactgcagccagatgatataagtgctgatgtctctgccttattgctaagactccatgcaataaaactcagctgattgctgttcatgaattcaagccactcgttggcagatgcataatctattccgccgttgcctgatgcgtcacatatactacattcactgataaacactggaactccggcattaagtgctgtgcttatcttatttcttatattttccttatgtgttcctgcataaaaatgtgccacatacataacatttccatcatcaagcgtattgccgacaacgctgtcaacatcctgtgaccatgtattagttcctacaagtataagtgaatgatcgtcgaattgtcttattgtgcctattacagtctcagcatatggcttaatgtttgaattccagtcagcaccaacaggttcattacatatttcatatattacattgtcatggcctgaatacttagatgccatctctgcaaaaaaatcacacgcctcctgagtgtgtcttgatggtgcataattaagcacatgccagtctataattacatacattccaagatctgttgcataattaactccattatcaattatctgttttaatgctgctttgtctccacctgaaagatatccattatattcttcaggatacatagcaattctcactacatttgcaccccaatcgtcccttaaggttgcaaatgcatcataattaacatagtccggaaaccatgatattccatgtgtacttacacctctcagctggataatgttacctgattcgtcagttaatttcgtgccggatacctgaagtcttcctgttggaaccgttgttactatgccttcattgcttcccgtatcagagttatttcctgaatcatttccagaatcacttccaccaggctgtgctgtatttccatctgacggcttcgtatcttctggctgtgctgctgttgactcttcacttgaatcagcaatttcttctcctgctttatatgcctttccatcattagcaagcacaatctccacacctgattcaagcttgaaatcaagtgtatatttcgtaagtccctccttagacgcagaacttataatgaatccgacactattcatctgagcctgactctcaattatcttattataatcgacaggcacaactctccactctgaatcagatgtatcaactgtacagttccagctctgctctaaagttataccacttattgtattaagcttaaatgtccagtccgatatctttgccgtctctttattatcaataacaaggtcgtactgtgcatagaatctgccattgccctcccacgaattagactgcttaaactgcattgttacagatgtctgtacctgttctcccgcatcttccttagctgtctctgtcacagaaccagtctgtttctcattattcaccgtactttctgcattaacattttccttatgtttccctgattttgataatactgcaaatgtaacagctaatcctgttacaattatagctataactattattatacataatttctttttattcatcatatgtttttccacccccatttttttattatagcaaaatatacaaaaatacaccatatcctgcattataatcagaatatggtgttaaaattatcttctttctctgtcaatatattcttttttagttacaagactcttatatgcaggacgtattatcttatctgtagttattaattcttccagtctgtgtgcactccagccaactattcgagctatagcaaataaaggtgtatataactctcttggtatatcaagcatatcatatacaaatccactgtagaaatctatattaggacttactcccttatatatttttctctgttctgcaataagccttggtgcaattttttcaatattattatataaaagcatatcttcattgcgccccttatctgttgcaagctgctccacgaatcccttaaacactttctctcttggatctgagatagaatatactgcatgtcccataccatatataagaccttttttgtcaaatgcctgcttgttaagcaatttatccagatatgcagctatttcttcttcatctgcataatctttaacatgctccttaatatcatccatcatattcataaccataagattagcgccaccatgtttctttccttttaatgatgacatagctgcagcaataacagaatatgtatcagaaccagaggatgttacaactcttgtagtaaatgtagagttattaccaccaccatgttccatatgcaacagtaatgcgatatcaagaacccttgcttccaaatccgtaaaacatgtgtctggtctaagcattctgaggaaattctcagctatagataattccttttctggtctgtgaatatacatgctctgatccttctcataatgattataagcatgatatgcatatgctgcaatcatcgggaatgttgcaataagctgcatactctgtcttaacacattaggtatatccaagttatcttttttcttatcatatgaaccaagagtcagaatgctcctggtcattgagcccattatatccgctgtaggagccttcattataacatctcttgtaaaattagttggcagcttcatacactctgataactcgtcacggaattcctttaactggtcattgtcaggaagttctccaaacaaaagcagatatgctccttcttcaaaaacatatttttttcccttgcttcctgcaacaaaatctcttatattgtatcctctgtatgacagttctccatcacatggacacttttgaccatcacggtattcaaaagcctttatgtcagatatattagtaagccctgtcaatactccctgaccattttcatctcgtaatccacgctttacgccatactccgaatacaggttcttgttaatactatcattgttttcacaaagaaccgccatctgctccatgtaattatccatattgttcattcccattacccctttcctgctactcattaaaaatttttatattattcattttcagataatatattattaaacttaaacataaataccatcgttgttacaatagccgcaataatatcacttaccggctctgcaagaaatacagcaaatactttatttggaaaaatcaatggtaatatgaatataagcggtatcaacaatataagcttccttaaacatgccagtataagactgacttttgcctgccccaatgccataaaactctgctggcagcttacctgaaatcccatggcaaatattcctgccatatatattctcaatgcccatgctgtataattcacaagtattttgtcacttgtaaatatgccggcaaacagctgtggtgtaagcatcataattgcccagcttatacatgtaaatattacacatgctttaaactgcgtaaaaaatgctttcttaaccctgtcattattctttgctccatagttgtaactgataaccggctgtccaccctgacatattccctgtaacggcataacaataagctgattagtgcttgttataattgtcattgctcctaccgcaaggtctccgccgtatctggaaagacttgatgtaaagctgattgacaaaatactctctgtagataacattacaaatgttgatattccgagtgcaagacacggtccgattatcttcgcatcaagtcttagattagctttcttaagacgaaggattgtcttgttaccagtcaggaaatgcagaatccacacagctccgacagcctgactaagcactgttgccagtgccgctcctcttactcccatattaaatacaaatataaatataggatccagaacaatattaatcactgcaccaattactgtagtcagcatgctgatcttagcaaacccctgtgttgtgataaacatgttcattgccataacaatcaggacaaatacgcttccgagaatatatattcttgcatatgacagagcatacggaagcgttgcatcacttgcgccaaaccatcttaaaagctgtggtgctgatacataaaacaccgccgtcaatacaaccgcacatatcattataaatgtaaaacaatttcctataattctctcagctgtatcattgtccttctttcccataaatattgctgcccttggtgctcctcctgaaccggcaagcattgcgaatgcattaataagcataagtatgggagtgaaaagtccgacccctgtaagagcattagccccaatacccggaatatgtcctatatatacacggtcaactatgttatacaacagattaacaacctgtgctacaactgcgggaattgcaagcgaagcaagaagctttgttatatttccctctcccagatttctcgtcatattattattcttcatattaaacctcttagctctgtttaattgcctgatatctttctcacatatctgaccattaatttatttaactataatatcattaattatttatatagtatatagatttttatctgtttacgaaattttcataaatgcccacattataaaagctgccactcatttgctataaagtggcagcttttatatgacatttttattataacaatttattttgtcttataaccaaattcaggaattgcactccatctgttacggaagtaatgagcaaccatctttggttttctgtctcttgtaaacagtcccttcttattaccttgtactcttaacaggctctggcttgttgcaaagtctgcgaagttccatgcctgttcacctacaacaaagtcgaattcatcaaatactttattattcatctcataatattctacctgatattcttctgtatacataacagatgttgtatcatggagtccgctcactgtatcagctccatattctgtgaacataacaggctttccaagtttgccccagtctgagagttctttacgaagtccagtctctgacacctcaagatcaggaccaccaaaataccatccataatatctgttaagacagattacatcacttaattgagatgagcagtctgtatcagcagttgttccctgaacacttactaatgtacatggtcgtttctgaggatctaattctcttgcaagatcatataaaggcttaaagtagtcatatgcaccttctgctgctgaatcaggttcgttagctatgctccacataacaacacatgcatgattcttatctcttgatatcaaatcacggataacatccttatgatgttcctgtgtctgcactccatgctccttatcaaatgttcctattctctctccaccaaaattagctcctccgccgaactgaagattgactcctactgctgttgtttcatcaataacaacaataccttcttcatcacaaagtctcatcatctcctcgctataaggataatgacttgttctgaagctgttagcatgctgccacttcataattgatatatcctttgtattcataggaagatttattccacgtccattaggaaatgtatcttcgtgctttccgtaacctttaaagtaaaatggcttttcattaattaaaaactttgtgccatctactcttacacttcttacaccatatggaagtgtatacacatcctgtcctgctgttacctttatcttataaagataagcatttaatggctgccataatcttacattatttatctcaaatgtgccttctgacccttctgtttctgaaagctttgtgccttcttcatcaaataattcaactttacatgttatgttgttgtaatcttttcctttaatttcaacattataattaagtactgccgatggttcttcttttgtgaaatcaatgtcagctgtaactgtaatatcattgatatatgtctcaggtgttgtgtagatttttacaggtcttgtaattccacaataattaaagaagtcaaagttaggattgttctgtggtttgtcagatgcacctgcacccatgccccccatcattccactcatcatgttagccttaccaccaactggcagagttgtgtaatcaataacattattaaccgcaatggtaaggagattatcaccatcctgtaaatgatcatttaattctacttcaaatggaagaaatcctcctttatgctcacatatcagtttgccattaagatatatcatggcataatgtgtaactgctgcacaacgcagtacaattctctggctctttacatattccggaactgatatatttctctgataaaatacccatccataatgatctctgaaatctgtcccctccttaagatcattataagaagctggcacaggcattgtatctgcatctttcaaaggtttctcataccatttttcttcaaaaccttttccgttatctaacttaaaattccaaaccccgcttaaatcgcttaataatcttgactgtgttaaaactggatataacataattaattcctcctgatttatatttataatatttttactgctgttccttagctgctcttatttcttttaacttagctgcatttgcttctactctctttttattcaaaggatataagaatattaatgcaagcaataataatgtcattccggctgccggcataagacatgtcacattgtagattccgtcaataaccttaggatcaaatgctgtagctgttgtataaccaacaatcgaaagaagtacgcccgctaaacctgatgaacatgcctgtcctaactttcttgcaaatgaatatactgagtaaattgtaccatcctgacgtacaccattctgaacttctgattcatcgataacatccgtaatcatagcccatataaccatgttaaacattgaagtaccgattgttgctataattattaaagctatccagatccatacattatgagtgtgaattataaataatgttataaatgaagctgcactgataatacatcctataactgacaattctttctttccaatttttgacgcaagctttgtaataaatgttgaaagtaaaagtattactattgttcctgaaagacttgcaatcgacattgcttttatattgccaaaataatttggataaatatatgcgttcatgttacttaatgataactgtgcaagtaaaaataccaatgcacatactataatgcctattaaagatctgttatgggcaagttcctttataagctctccaaacgagaatttctgtgtgttctgtccaaccttaactctttccgttgtcattttgtagcaaagcatatagcagattacggctcctattgaacataccaaagcaccaagcatcattttctgaccggataatactgaatttcctgcttcgtctgtataatatactacaagtggtaatacaacacctatcgctgtctgagcaagtgtagctcctatcgttctccagttagaaagagaagttctgtctgtcggattgtctgaaatcgctgatgccattgaaccataaggaatattaattcctgtgtagcatatacttccccaaagaaggtaagtgaaaaacatccagaaaatcttaaatcccatcggcatatctttaaaccatgtcgcatacatcagaaatgatgctaatgcaacaggaccacacattcgtctgagccatggtgcaaatttgcctttctttcccggcctgctcctgtcaactatctgtcccattgttacatcagttatagcatcaacaaatcttgccgccatcatcataagaccgaccagtgctgctgaaacccccataacatcagtataaaacttcaacaaaaacatagctgataacaaaaaagtaaaatcgttaccgaagtcaccaaacatataaccaagcttgtcttttataccaaatggcctcacctttccattgttatctgtcataataaaacctccatcactttattaaatattatagatattttttctttaaagaccgtccttaaatattatgtgcactattgtgtgctctcttttctatgtctttatattaacctataaataacatacccgttattacagattttagtatatctagtattatttttacccatacattttttatggcaaaaattgtactataaaaaaacaaactagtactaacatgttagtatcggtttagtaacatgttagtactagtcggcgtgacatgtcagtttatttttatgctttgaatttttgttttcttctgttattataatatagtaataaaaactgatagagattggaggtttatatggactataaagtatatctggactacaccatggaactattatctaagataaaaatcccatcttatataattgacataccatttctctgggatgacagatatgatggtgaattaagaaaaactatcctgaatgatgcatttttaattaatcataaagaaacatttcagaactttattaactgttctgacaaaaataatacaattcttctgatgcatgacagttttgcctgtgattatatatatattaaattgcccgactcaaaaaaggctttctttgccggacctttttcatttgaaaagtttaccaatcaaagaattgttgatttatgttcatacaattcaataccaccaagatttactgattttatgcagctttattatgccgcactcccggtatttgcagatgaacgatgtatagaagcaataataaactgtttatgtaataaattgtggaacagttatacaattgagaaaaaacattttctaaataaaaatgcttctgaatacatgtacaatgattatacccccgaaccgacaaagcaatccattgaggttctagaacaacgctataatgatgaatctcttctgatggaatatgttgctcatggtgattttgaatcaattgacaagcttgctcatcttaattcatctggaattaagccccgcctgtcagattcaatccgcgatagaaagaatttcatgataattcttaataccctttgcaggaaagctgcccaatcagcatatgttcatcctattcatcttgatgagatatcacgcaaatttgctatcaggatagaatcctgtaccacaattgcccagcttgaaaccctggaaagtgaaatcacgcgtaaatattgtctgcttgttcaatcttattctttaagaaaatatagcaaacctgtccaaaatattattaattatatctcgtttaaccttactgatgatctcagccttaatactatttctgctgaatttgctttaaacagcagttatgtatcttctctgtttaaacgtgaaaccggctcaacgctcactaattttgttaataataaacgtattgaacacgctatctacctgctcaatacaaccaagcttcctatacaggacattgctgtacaatgtggaattacagatgttaattatttcaccaagcttttcaaaaaaatcaaaaacatgactccttctcaatatagagaaatgattcaataaataaaaacaaccatctggatacctgttgatttccggtatccagatggttgtttttaattgttttcaaaataatcaggataaattattcttaacttatcaatctcattaaaaattctgttaatatgtcctttaataacacgaagatacattcttttatcttttttccttattgcatctataagcatttcatgttcctcattagttttaacactaatagaactattaagttccgctaagaaacgtattctgttataatgactcatctgcattttaattatattagcagcgagctgttctccagagctttcatatataagttcatgaaaagcattatcgatttcaatccttggaactttttcattacatttatcataattaatgagacggctgtttaattcttccatcttatcaagcatctcattgctgacatgctcaaaaaccgggtctaccatccccacttcaagactttttctgacaaaccattcctgttcaaaacgtctgcaattaatacttgcaacatacgtgcctgactgaggtattattttaagaagtccctccttttcaagattaacaattgcctctcttgccggtgttcttgaaacattataccttacagctatcttctgtgcacttattgaatccccaggtacaagcttgaaattcatgatatcgtattttaatttttcgtatgtgtcttcgtttaatgatttttccataaccctgcggcctttcttatactatgagcctgcttgttatatatattaaaggtattttttaagtgtatttcttacagcaccctttcctgctatctcttcaacaaacatctcttctattttatcgccaattcctgcttcatataaatttataccaaatatattggcatttgacaataaattcttaagctgtcctgtataagatgatatgtcacctatttttatacctgataaatgcttctttaattcatctgccatcggatctggagacaattcgaagctttcgccattatcatcaattccaagaagatatctgcaccatcctgcaattgccaatggaatcgctattaattctttggcacttccgtcctttgcgacatatgacttaattgtttcaccatatcgtattcctaccttctgtgaagtatctgtcgctattctttgcggtgtatcaggcataaaaggattaggtattcttacattaagaacttcatccacaaacttctgtggtgaaataatctccggattaattaccacaggcattccctcagataacccaattcgtctcacaagctccgaaagttccttgtctttcatttcatcagcaatcagattatatcctaataagcagccatatactgctaaggctgtgtgtaacggattaaggcaggttgttactttcattcgctcaaccttattaactgtctgtctgtcagtcataaacacacctgctttttcaagctgaggtctgccattagggaacctgtcttctattacaagatactgtggtccttcagcatttacaaatggtgcaatatatgtcttcttagatgttatcaccggactcatatcctcaacacctgcttcctctaatgctttagcaacactatctgctggtcttggtgtaattttatcaatcatagaccatggaaatgatacaagctcttcattattcacataatcaacaaaatcattaccaacaaatccttttttattccactcagttaccatctcggttatcgaatttctaagtttctctccgttatgtgagcagttatccattgatacaactgcaatcggtgccttacaggctttaaaacgttcatacaaaagtgctgctgttactgccattgctgatgttgctttttctggtccattatcaatgtcttccctgataaaagagaaaaactctcctttagaatccttcaacgcataacctttttctgtaatagtaaatgacaccatctgaagcccagggtcagcaaatatctcctttaatctttcccattccttctgcgaatatgattgtgccttaatagcttctgtaagtgaaccaagtacctttttttctgtatttccatcctccttcaatgtaacagccataacaagattgtcaaatggcttatatattttatctactacatcgaagtcaaatgtttcaacacatgtaatgcctttatctgaaactccttgttctaataatgaatctgcaattccaccaatgaatatcctgaaaatattaccaataccaaaatgtacccatacaggtgacttttttgtatcctctgcaaccttttcaacatcatatgaaggcagctttatgccagccttttcccaatctgtcgtattcttaataccatttattgaaagtttcataatatcctccattatgtcataaaaacccaatgttaataattactttgatgatttatcaatagcttcccataaaccattaaggtatgttgcacctaaagccctgtcatataaaccataacctggcatagccacctcatcccatatcattcttccatggtctggtcttataatgccgtcaaaacctgtatcatataatgttttcataatcttatacatatccatagaaccatcagatgataaatgtgctgcttcttcaaaatccctaggtgaattatatttaaggtttctcacatgtgcaaatggtattcttcctctgcacgccttgataatctcacaaatatcattattctggttagagccaaatgaacccgtacaaagtgttattccgttatatggtttatttacagcatcaagaagttttgtaacagaatccttacctgtcataattcttggaagtccaaatataggccacgcaggatcatccggatgaatccccatctttatatcatacttctcacataccggaccaattgcttccagaaaatatatcagattattaaacagcttttctgcgtcaacatctttatacatttcaaaaagttcttttaatctgtcaagacgctctggttcccatcctggcattacgaatccattagacatctttgcaactgattccttcatatgctccggatcaatcatatcaactgtatcctgattatatgcaagcaccgttgaaccatcagctctttctcttgcaagttctgatcgtgtccagtcaaatacaggcataaaattgtaacataccacatgaatatccgcttctccaagagcctgcagagtctttatataattgtcaatgtgctcatctgccttagctgtgccaatcttaatatcatctgacacattaacagattcaataccagcgattcccaacccggcatcttcaacaatccttttaagctccgctatttcctctggaagccaccgctccccagcctgcttaccaaaaagcgttgtaataacattctttacgcctggaatctgtctgatctgcttaagtgttacgctgtcgtatcctggtccataccatctcaatgtcatatccataacaaaaatcctccttttacataacaacattattattctgtaccatatttgcataattatttgctatgtgtatactaacatgtcagttctaacatgtcaatgtattttttaagtttattttgttatgtttttcaatttattttgatatcttttccttctgcttcaccatattgacatgcgtaattcccatcaccctgtcataaaacatctgccgtgtactgctgaacagacataatatgaaatctatcgcaaaatatgccgtaaccataaggcacaatagacatactgctatactgacagagaatctccaaccatcagccttaagtgccacatgataaagattatatgcatatacaggagaaggcaggcttaaaacatacagaataaaatatcttcccataagcctgaaaacattcactcttctgtgagtatcagccttaatattctcagcttcataatctgctgccttattatcagctttcttactctctgccctcactagtcttatattaacaagtgccttgcctatagttcttcccttggtaattactgtaactattgtaaatgctgtaactatatataccgctatggcaaccagatatcttacatcgtacacagcattcataaacttttctttatctattgcaaaaaatatggcaaccggagccattatcacaagcatatccaacgcccatgctattattcttctgaattccgacacaatctgtcctctgttgtaagcaacttcatccattctgtcacgctttggaagcatgaaaacaaccgccggcataacccagaagcccaccattcctccaagtgtgttacatatcaggtcgtccacttcaaagaatctgtatggataaggatatattccatacaagcctgacaactgcgtaagctcaaaaaacaagctgtagcagaatgacattataagcacctgccaccattttctcttaaaatagtatctcagatacacaccaaatggcactaacagcagaatattgaaagcaatctgccagaagtcaccacatttgaacagattaatatatgttgccggattcgataaagtaacattcgcagtagcaatgactcttcttaccgcatcaaatggcactaacagcatacatgctgaatccggtgtcactgaatcaatcggaggcagcggcagcactgtcataaaatatgaggtaatcatgtagaatataaatgtgtacacaacccctgttcttattacaagtatcgagccatatttatgatattcgtatattatgtacggcagtgtgaaaagcacggcaagaaccgggaacacataacacgctgaaattatcggttttaagtatatttccatgaattatctccagtccacattcttggcattcatcgctttttctttaagtgttgccagtctctttattgcttcattaagtgtatcgtcctgctttgcgaaatgaaatctcacaagattatgcacatcttccctgaaaaagcttgaccccggaactgccgccacaccaacgaactgtgtcatccattcgcaaaatttcacatcatctttaactccgaattcactcacatcaacaagcacataatatgccccctgtgggtctgtgtattttaatcccagcttcttaagaccgcctacaaatacctctttcatatgtgcataatgtgcggcaagttcatcataatatccatcaccaaactctaatcccacaactgctgcctccatcaatggtgcggctgcaccaactgtaaggaaatcatgtacctttttaactctgtcgattatctgtgggttagcaataacataacctaatctccatcctgttattgagtatgtcttagacagtgaattgcacacaattgttctttctctcatgccctcaagcgcctgcatataaatatgcttattaggtgcatatacaatatgctcatacacttcatctgtaacaacatatgcgtcatatttctttgcaagttcagcaattgtctgcatttcctccattgtaaacaccttaccgcatgggttggaaggattacacagaattaatgccttagcgccctgtctgaatgcatcttctaacttttccttatcaaaatgaaattcctgtggaactaatggaacatatatcggctctgcacctgaaagaattgtatctgcgccataattctcatagaaaggcgagaatattacgactttctctcccggattagtaatactgagcattgtagccatcattgcctcagtacttccgcatgtgacaacaatctctgtctcagggtcaatcttaacacctgaaaaatgttcatatttcttagcaactgcatctctgaaattcttagctccccatgtcaatgcatactgatgaggtccttcgcctgcaactcttgcaagcctgtctgttatagcctttggtgggtcaaaatcaggaaatccctgcgataaattaactgcaccatatttattagcaactcttgtcattcttctgatgacagagtctgtaaaatttgctgatctgttacttaattctctcatgtgtattatgtccttcctattaagttttttattcggggtgaatagcgtccaattcactttgcaattatactccaacacagcatatgttcaaacatttacattctattaatttacatattaatttcttttttgtttatataattcacaaaattctcacaaactttccaactcattttcacatttcccatttaatattaacaatgtcgaaagacaacagacaaactttttcataaaaaagatggctgaataatctcccaatacagcagccatcggatgtttgaaaaacatttttccccctcataaagagagccgggatatacgaacttcaaccccattgtcagtccgtatatcctggctctcttcatattattcagctatgtactccctgactttcttctcactatcgagtctgcacgcaacaatcgtcgacataatcatgtaacgcacaacacccttggcgatttcctcctcataacggcacttcatatcgacaggatatcccgatacaagaaaatgtatctggtacttatcctgatttcttgataaaaatgcacttacatacagcccattaagcactgccgtaactatttcatcatcagtaacaggaatgtttatcttataaccctgtgatgaaaatgaaactactccgtctctgttatggaatcttccgtccgcaatctctgctattgaatatccaccaacatgattcatcattgcaccaagcactggcatttcaaggtcattctcaattatataattgtagcaatctgttggagtattaaacattttccttctccatctcttcattaatgatgtcttctgaggcagccattgctgcaagagtcttcgtcagaagttcatcaagtccccaaccaagctgctctgctccacgctcaattacttctcttgaacagcctgctgcaaagcccttgctcttatatttcttctttaatgacttaagctccatgtccttagtactctttgatggacgcataagtgctgctgcccatataagtcctgtaagctcgtccgctgcaaaaagcactttctccatctcatgctcaggtgcaacatcaactgtaattccatagccatgagaaactactccatgaattatatcctctgatacgccgccctctcttaaaagttctggtgctttgatacaatgctgttcaggataaagctcgaaatcaatatcatgaagaagtccaatgattccccaatactccgcatcagcgccatatcctaattcgttggcataccacttcataacagcctcaactgttaatgcatgctgaatgtgaaatgggtctttattgtacttcttaagtaattcaaatgcgtcatttcttgaaatatgttccattgttagctcctccaatattgctgttagttaattactatatttcgtaatccatgcatgaccttactgctgtgtaaggtcttaccttgctgtctgcaactgccacatgcttaggatgtacggcataaccctttaaactttccacgctgtcaaatgttgtgtctaacattacatctgctgtagaacttggaagacactctgttcttacttttacctctataagccccggaatctgtcctgcaagaccttcaagtccttccttaatacctgccttaacctgctctttttcttctcctgcaagctcgtcctttaatttccataaaataacatgctttaccataataattgctccttaaattaacatttataaataatttattactttatcccctcattgtaaataaaaagtcgtcaaaatgatgacttttatccataaaaatttcatcattttaacgactttattcatataaaaatatttcttacttaaatcaaatagcttccaaagcctgtgcaatatccgcaatcagatccttcttatcctcaagaccacatgagatacggataagtcctgctggaattccagcggctttaagctgctcatcattcatctgtctgtgtgttgatgttgcagggttaaggcagcatgttctcgcatctgctacatgagtttcgatagctgcaagcttcagattcttcataaacttctctgcagcctctcttccaccctttaactcgaatgaaactactccgcaaccaccatcaggcatgtacttcttagcggtttcatagtacttgttagaaggaagtcccggataattaacaaattcaaccttatcctgcttctcaagaaattctgcaacagcctgtccattttcaacatgtcttggcatacgcacatgaagtgattcaagaccgagatttaatataaatgcattctgtggagactgtatgcagcctaaatctctcataagctgtgaagtacattttgttataaatgcgccttctttaccgaacttctcggcatatgtaattccatgatatgattcatcaggtgtgcagagtccagggaacttgtctgcatgtgccatccagtcaaactttccgctgtctacaatagctccaccgactgctgctccatgtccgtccatatatttagttgttgaatgtgttacaatatctgctccccattcaattggtctgcaattaactggtgttgggaatgtattatcgacgataagtggtacaccgtgtgcatgtgctgcatttgcaaacttctcaatatctaatactgtaagtgcaggattggcaattgtctcaccaaatactgctcttgtgttgtccttgaacgctgcattaagttcttcctctgtgcagtcagggtcaacaaatgttgcttcaattcccatcttcttcaaagtaacatcaataaggttaaatgttcctccatatatagaagatgatgctactatatggcttccagcttcgcaaatattaaataaagcgaagaaattagctgcctgtcctgatgaagtaagcattgctgcacttccaccttcaagggctgcaatcttagctgccacataatcattagttggattctgaagtcttgtgtagaaatatccacttgcttcaaggtcaaaaagttttcccatatcctcacttgtatcatacttaaatgtagtagactggattataggaatctgtcttggttcaccatttccaggagtatagcctgcctggacgcattttgtgttaattgaataattatccatatttccctccggctttatatgtttacatgacatgaattatatcacaaacgcaaagcatataacagcacattttaataatctggctacacatttattaacataatatgttatgatatcaattatgctattatcagtttttaataatattgtataataattaagaggttttattatgaataatcagtcagcgactatgaacacaaaagataatccgcttggatataaaaaagaatccactctgcttgtcggttttgcaattccatgcattatttcaatgcttgtgacagcgctttacaatattgtcgaccagatatttatcggccagggaatcggcatgcttggaaatgctgcgactaatattgcatttccactttcaacaacatgtacagctatatcgcttcttctcggtataggaagcgcgactaatttctcgctgtatcttggtgccggtgaaaagaacgaatctgaaaaatatgccggcaatggtattgtgcttatggcattgtttggaatatttctgttccttgtaaccactatattcttaacacctatgcttaaattctttggtgcaactaatgatgtacttccttatgcaaaggcatatacaagaatcactgcgtttggcttcccattcttaattgcaaacactggtatgagcaagcttattctcgcagatggaagcccacgatattccatgatatctatgcttgctggtgccatagtaaatactattcttgacccattgtttatctttgtctttaacatgggaatgacaggtgcggcacttgcaacaattacaggccagataatttcattttcaatcagcctgcgttatatgtttcattttaagacaatcaaacttagcagggaaagttttactgtatctgctgcccactgtaagaaaatatttattcttggagcaagtgcctgctttaatcagattgcaatgaccgttgtacagattgttatgaacaatacgctgtcacactacggcgcacaatcaatatacggtggagacattcctcttgcctgcgccggaattataactaaagttaatatgattttcatgtcatttgttatcggaatatctcagggaacacagcctgttataggttttaactatggtgcaaagaagtacgcccgtgtaggaaaaacttatcttcttgcacttggtgcagcttctgccctgtctttaatcgcatttgcatgcttccagatattcccaagacagattatcagcatatttggtaacggaagtgacctgtactttaaattctctgaaagatatttcagaatatatatgtttctgacaattgttaatggcatccagcctgtaacttccaatttctttaactcaattggcaaatcacagcttggtgtatttatgtcgcttacaaggcagattattttcctgctgccacttatcattatatttcctatattcatgggaattgacggtgttatgtatgccggacctatagcagacgctgccgccgctatcgtatgcggatactttactataagagaattaaaagaattaaaaaagctggaaaacgatataactaaatgttagaatataaattgtgtgtgcattcgtatatttaacggattatttttaaaagtgctgtcggtgttgcatccggcaacggaatcgatattattgaaatagtaaaaaatgctgactcagcaatgtacgctgacaaacaactcttccaccatcggtgattgttgctatacctcatgtaagtgttaatttaagccgccagcttaattgctggcggcttttttctcattttggggggatgtagtggtaaatcttggctttttgaggcagggcttcctataagaaaataaatatattgcatcttataggctgatttgccctcttacgctgtctaaaatgtggttttagagttggatttcctataagattgctgatcatagttactttataggtgtaatttgcaactaatatagtagtcgatatgatttttgacctataaaggctctggatttgcgactactgataggtatcatatgtttttcaatcaacagtcttaatatatcttcttctttttgttgttccaacacaagctaataactccttattcactaattcatttaatagttgtcttgttctaggaccttttaatccaatcttctctgctatctgttccgtactatattcaacacctatatccatatttgttaaaatctgtttgtgtcttgctgataaatctgacctattcatgttttttgaatctgctgatttttctgctaattcttcatcagattccttttccatcttcatcacaagtgtcacttgattaagatttgtatcctctattaatagaggttcaatccacccttctgatttccatacctcaagaattgttgggaagccagaaccagcattatctccaaatcctactaatcttaacattgtctgcatatgaggattccttgactttgagttacctccacgataaatatcttctagaggaagtaaaacttcctcgtgtatcaaccacgaaaaagggtgatacccaaaagtaccaccctacagactatatatctattctcctctacttgtaatcaattattatttctgccaagaatcttagacattcctgttgccacaaaaagatatacaaccatattaactaccgacttaagtagaagtcctggtgctgaagctaatcctgctgcaaagctgcctgctattattgcaccaaatacaacatatcctaatgtcatgaaaagtaatgtaacaactgcaccaacaattcctcttactgaaataaccttacatctgtcaaacttacttttcatattgccaaatattgcgcatgctattattggcatgatggtctttattataagtgttggaagtgcccatactgcaaatccagttaatatatctgccattgcagaaccgattcctcctgcgagtgcgccaacaactggtccgaagaaaaatgcacatataagtattacgctgtctcccaaatgtgcatatcccaaaggaataggaatctgcaccaccattgttgcaacacatgtaagtgccataaatactgctgttacacacatctgtgttacagtaatatgaaatccttctttcttaatcccctgctgtactaactgtgtctgttgtgcttccattttatctgcctcctatatcaacatactttaattgcacataagaataacagataaagtgacatgtgtacattgtcattttgagttaaatttatatggtcagattaagttattattccccttctttacataataacatctggttccatatattgtttttgttttattcaacccattatgtacaattgttttactaaaattatatcttgccatatttattatccctcagttaatcttattctcaaaatcctgtaactcatgaaaaatcccatctatataaacagttgtatcttccactctatacaacataaaatatctatggaatttaaaggatatccttctatatcctaaacttctcaatttttcgttatcacataattttaaactttctgcgacctctgctaatatatctttagtatattcaaaatcatcaaggagacttcctgctgcctgctgattctttttttcatataatatgtattcaatatactcttgcatattttctttagcatcattagtaacaaccactttatatgccatactttgtcctcatatctgcaacaaaatcacctgcttctgaatattctccattctttgactgatctcttgactttgctaatctgtcaagaacttccttttccgaaatagcaatgtaaggattaactgccactttctttatctcaaatggaaatccattattagcaactgcctgtgttaaaaacattcttatagccgttgtagtatctgttcctaattctttaaataaattatctgatttaatcttcaaatcgtcatccactcttacttgaatcgtacttgacataaaaacacctccatattcatatagcatactatcttaatgctatatcattacaaatgtaatatatcataatacattatatttttcaaatatttatgctataataaacagacatattacgcaccacaaacaaggagtcacattttatgaaacccaaatcagatttaagcagacaattatatgaattaatgctgcaaagaggttatgaggaaaatttctgtgatattgtcactaagaatctcaatactgatttcactgccagccgcatgattggttatctctatcattatgaccaccctcctgttgaggagatagctgatgaaatgatttccattctaagcgacagaaaccgtatcatgcagaaaaaagagcttgaagaaactaatgccaggtgaaacgattttttgctccacggctttaacgacgaagaagaggaagaatagactgaatctattctccctcttctttcttaatcaattcatccataagctctttataatctgaggcttcaagcggaagttctacttttatgcctttgcatgctgaataataggcactggcacacaacatgagtgaattaattccctcactacccttaacggtcagataagactcatcacctttaagcaccgcatttgcaaagttttcaaataactgtgcatatggctcagatgccttctcgaactgtatagtttcctctgcaaatgtcatattctgccttgagttgacttcttcattcttgatatactcacatacatctctgtgtcttgtaatggtgagcgtgtcgtcttccagaagaattcttgccttcgttcctataatctcaagtcgctcttcgtgacaggcttcgcctgtggatagtataaatgtgcctgtctttccattgtcgtattccataacgatagtagcctcatcatctactataaagtcgttgtattttccaaatggaatcgctgcaaaaagtttctgtggcattccaaacaggtactgatacatatcaagaatatgctgtccctgattgataagtgctccaccgccttcacctgcaaagctgcttctccatgagccagatttatgatagtatgaggttcttaaatatcgtgaattaataagacatactctctttatatctcctaattcaccattatctatcatctgcttaatcctgatgtatttagggtaaagcctctgatgaaatatcattccatatattctgccactttcactggcagccttctgcattgcaagtgcttcacctacatctgccgctgccggcttatcacataacactgcttttccctttgcaaatgctttcaaagccagttctttatgagttttatgaggagttgctataataactgcatcataacatgattctcctgtctcaaataattcttctgcactcctgaatatccttgcattatcaccatcagtattaacaagtgattcgccccattcaataagttcatctcttcttataaccacagctgataatttcatatgcggaacttctcccgctgttatcattctggcatatttctttccaacacttcctacacctataagtgccacctttaacaattctttctgcataccatgtaccccgtttcattatattaactatgcactacttctcctgtttccacagccttcttcagtaagatggcggcatacgcatctgcaagggcatcctccatactatatggtgcagacgcatttcctctgctatactctgccgtattcttcatcatcactgcgattgctgtttcatcttctgacagaccacacaatccaaattccggctcatatataatcttattattaaatgaaattttcttaatttcacgaatcttctcaaaattaggattagaatttcctgtattaatcacatgggaatccgttatgattctgccagtctgaccttcattattctcatcaagataatatacacagtcatcaataagttcgcctcttacaccctgaactttaagcgtattctttctgattggtgacctgtactgctccgaatcaaaatcataccatgccactttcccgctttcgaattcaaatgtggcgacgcatcttttctttcctgcaatcctgccatcagtgaacttatcatatcttgtaagagtctgtgttgtaggaaactcatatgtcttagctgaaactgtatacttctctcccggattaactccaagaaatgctcttataagacttattccatgatattcatgcgccagtgacacatttacacagctgacatcaccaataattccttcattaataagctttaatgatgctttaatattaggatactccctgtactgttcagcaaccacctgttttttaccacatttgtaataagaatacagtttattaagcgaatccgtatcaagtgccgccggagtctctgataaaacagttattccacggtcaagccattccattgaaacatcacatatggcgtccttcttaacagccacaactgcaaaatcaggtttatatgccgcgcattcttctatagatgtagttgtatgtatctgatactgaccggcaattaagtccgctttctcctgcgtcctgcaatacatcgcatcaatacagaatatttcaggcagagcctttgctacgcgtacataatataaggcccgccagcctgagccgattataataaaatgatatttagatctcaatatacacctctcccttaacccttctgtcatatatctccccaagccatctcataataatttccttcggcttctcaaaaggtgtcctgtgactcagcatgaatttctcagccttaatgttctgtaatacatttatttcgtcttttaatatgcctgcattatacaggttatgtccgcatttctgcatggcatatagtgcgtctccaagaaagcaccactccccgtttacttccaacgcaacacagccctttgcatggcttgacggcaattggaatatgtgaagtcttacttccccgtcctgaatataaatgtcatcttctacgactgttcccatgccagtgtgtctatgtgtatactttccctgatacacctcatcaacgcccatacccggaagattaccgatatgatcctcgtgaaaatgtgacaagatagcattaacttttcttccattgctatatgtgtctactatctgtggaatgtctggatgattaccaacatcatacaaccataatgcatcctttccctgaatcatcacgacgttagctgacaatgggttctcggtaggtgatatatacgatattaaattattaattgcaacgactctacatttgtccattctttactccaaaaactccacacgcccgtcttcaagatgatacacagccccgataacctcaagacctttctcctcaagaagcttcatatctgtgttctcctctatcaccttaacactgtgctttacattgagacaggttgcaatatactcatctttctcttccttaatagcttccctgatatcgtcagttatatacttgatatgtccgtcggggtcatgctttattgccgcctcaactgcaccgcaatggttatgtccaagtacaaccaccagcttacagtcaagatggtctgctgcatattcaatacttccaagctgatgcgaatccactacatttcctgccacgcggataacaaaaagttcccctattcccgctgagaatattgcttccggtacctgtctggaatccgaacagcacagaacaatcgcatatggatgctgaccattctttaatgtatccacgcgcctttccagcgaaacatctcccggattgcttgtagcattaataaatcttttattaccctctattaatcttgactttgcttcacttgctggtattgacatattatcccgcctttcacaacttactttcctacagtttaacagaattttacccatattaaaaccccgtctgcaatataccacatatgatatataacaggcggggctgattattttattctaaatcatatcaagttttgtgttacttaaatgcttttagagaattttttgattttgcaacagtcattccaatagctaatccggatactgccattaacataataagaattctcatatcagatgaatctcctgttggcactacatcaactgaactatctggaacatcttctctgtcatctgtatctttattaatatcatcattaccattattaatgtcattatctggtacatcaataacttctcctgttacacccttgtaatctacgcttacagaatgaatagtaactctgttaccagactttcctgcaccagatgtacctgtatgctggaatcctattccactgtaactgtttacttcattctcaaatacatggcttaaatgtacctcatgaggcatgatactgcttgctgagtcctgagatgatgttgttgtaacatctgctgtaaatgtattgccagtcacatcaagcttaattgtgcatcctggaagaaatgctgttgatatgactgaatcctcaagcggaattgcaactccattcttatattccatcaatgtaaatgtacatgacttagctgcaaagctactaagggccggatcacttatagatggtactctggcaattcttaagccataaccagtcattgtttttgcatcatatttgaaatagatatctatgaactgtttagcactaccgaagccctgtgctcctgttttatgaggagaaagagtcaatgtcattgacatatcttttcgtgcagtatcatcaacatatacaagtcttgcaccctgtgtagttgtctgaagtcccgtagttcctgatgcgcctgatgctccctgtgcgtatgtatatggaagctcccctgaaacaggcttatatgctttgtcactccactctccaccttctctgtattcagcaggcagatagaatcctccataccaattaccagcttcaagtgtgtttttccattcataattattctcttctgtatcattctcagcttcaatatatgcaagatgctcaagatcaacattatatgactgtttctgttcatctgctacatatgctgacttgataagttcagaagctgcagtaaatactgaactgccttctactgaattcgaacgctttggtataacttcacagataatataatgattaacatcatctaagcggagtacatatgaagagtatggcttagcatcactatctacatatgttgtctgtgcaacgaggactttatctgttccttctttgtctgtagcacgataccagttaattatactttcgtctgctgcttcactattatctgtaaatgcatatgttacattaatcattccattctcaggtgctgataaaacaggtttttctgataatacaggtgcctcaaatatcttaggagtaactgtaaaatgtaatactttcttcattccgttggttgctgttgcaacaagacagcctttcttattgtctaatgttgaattgtcaccctttactattacagtaccatcagcctgtggttcaataacaagcgtatcgtcttcagtactccatgttacagtcttgtcattgccaccaagaacaacaggcgtaacctgaagtgaatcagaaacatttccctgaagtaccggaacaacatccttagcaattcctggatagtcaaactggatattccatgcaccggttggcatataatccttctgatttaacggatcccattcatcataacccgcaccatttaagagattatatatattatattccccattatacttaaatgctttcatctgctctccatcaggagttactgataaatctgtataatcaggactgattgtcaatggctgtccattaagagtattattagaaacaatctgtcttatatcatcagaaaaattactctgtttccattccatgccagtcatgtcgcccttaaaatcacagtcaataaaagcaaacggttttgtattcttacataatgtaattgttttattatctgataactgtgttgtaaattcacagcctaagaatgcctgcatatagaatgatgccccaccacaaggagtattagaaaacaggctaaacgtacaattttcaaatatcgttatataaccggttccaagcgaatcatctgtacactcaagatgacaatcttttataagagaacgcttaggtctgtcatctcttgagaaaagattaagtcttgatataatgttacaattttcaaagaaccattcatccatatctgtaatgccaggaactttagtaacagcctgtgcctgtgtaacagcttcctgtctcttagtatgattcttagtagtatctctttcatacactagatctacattacaataatttccgattgtaaggtcttttgcatgaaatccgtcgcctacaccaattgtgttaaagttaccattagctcctgcattctgtcctctgtctgatgcaattactacatcatcacgattaccagtcattcctacaagtgttatataagcctgtggaattataagacctataagatcattcttatcacgatcttctgtcttagtataatcgtcagtccaatatacatccggctcaagataaataattgttggattatcctttgtgccaggaattgcattagctactgcttcctgaagtgtcttatatgaatatccgcttgaagaagctaaattttgatttacatataatgcatgctctgaaagagtaattgattcaccattatagtaaatcgtctgtgtatcatcggctttcgtaaatgtaagagagccaataccagaactagtgaagatgagtgcaaaagccatcaaaaatgcgataaagaccgatgcatgtttcttgtgtcttagcatattctattcctccgttcattgtgattatgaacccattatatccagattgtactaatataaatacaaaaaaacagttcaaaaatcataataaaacgaaaaaacagcattttcacattatttctctaaaagccacgcaatctcttccttataaggaggctctttcttatcagttccttcaaccgcaacccatggagtctcaagaatcttaggcacatccaggaatctttcatcatagacaagtctgtgaagagtctcatatcctatatttcctttatcaatgttggcatgtctgtccttatgcgctccaagcggattcatactgtcattaatatgaaatactgctatctggtcaagaccaatcactctgtcaaattctgcaaatacttcatcataatgattaactaaatcataaccagcatcattaacatggcatgtatcaaagcacactctcaatctgtccttcttgtcaacgccatcatagattgccttaagctcttcaaatgtcctgcctatctcgcttcccttgccagccattgtctcaagtgcaatatatacatcatcattgttctggttaagcactgtattaagtcctttgataatctgtgcggttccggcttcaactccggcattgacatggcttcccggatgaagcaccattatatggcttcccatggcagcagtccttataatttctttttctagaaattcaacagcaagctcataagtctccggcttaattgtatttgcaagattgattatataaggtgcatgtacaataatctcctctatcccatgttccttagcatacttccagccagcttctatattaagctcacttatttcttttcttcttgtattctgtggcgcacctgtgtataacataaatacattagccccataagaaactgcttccttcgcagatgcaagaaacatttccttacctgccattcccacatgacttccaagctttatatctgacatatatgattcctccaatatttaacctgtataatttattatctgtccagttagaaaatccaaacgaattaattttaatattgcaatacttatgtgtcaatgcacaacatatgtatacttgcatactgataaatgtcatcaccactttcattcattttcaatcaaattcgttcataatttatatttattgtattgacatttaaacagcatattgatatagtactaaagtaccgattttatggtacttatataacaattattttataaggtgagatatgaaaaaacacaaacacagaaaacatataaaaacaatcaatactgttattgaaagctgtcttctcattattcttattgttcttgttgcaataatgatggttcttataggaaaattacagggaactgccagagttattaactataccggtcttgtcagaggcgctactcaaagagaagtcaagcttgaaatcactggtaatcctaatgatgaactcattgattatcttgatggaattcttgaagatcttaaatatgaagatggcaattataatcttgtcaagcttgatgacaatgattatgaaaaaaagcttgatacacagattgctttctggattttgctaaagaacgaaatatataaagtccgtgaatatggttatgaaaatactgatattgtaaatctcagtgaggaatacttccagcttgctgaccagactgtttctgctgctgaaaagtattctgaaagaattgcatgcaatataagattatttgaaacttttacagcaatagatatgatcattataataatatttataattaatcattccattcatgcaatcataattaccaaaaagaataaacagcttgaaaagcaggcatttcttgacctgcacacaggccttcctaacaagagtaaatgtgaagaaatattcagaacttcgcaatttattactgattctactgcatgtattatgtttgacctcaataatcttaagaaagctaatgatacacttggtcattccgttggtgaccagttgattcttaattttgcaaggcttttaagaaatgctgttccttctaacgattttgttgggcgatatggtggcgatgaatttattgccgtaatatataacactactaaggatgaagttactgatattctcagacagcttgacaaagaaatatccgaattcaatgagcttggaaaagcttttaagataagttatgctcatggttgtgcattctcttctgattatgagaattgcacattaaggacactctttgataaagcagataaaaatatgtacaataacaaacaggcagagaaagctggcagatagccgctttctctgccctttttaatattatgtattcatcaatttattaatatttctcaagtgattttatggcaaatgtatgatagaatataaaaatgactttactatattaacccagacattgtatatatggagataaataaaatgaataattataaacgcggactaataaccggcataccaattgcactcggatatctgtcagtttcttttacctttggaattatggctgtatcctttggccttagctggtggcaggccgttctcatatctatgacaacagtaacctctgccggacaatttgcaggaatcggcattatgattcatccaggacagtacattcagatgcttatatcacagattactattaatataagatactctttcatgtctatatcaatcggacagaaagctgacagccgtttcagtggcatataccgctggcttctcggtttctttataactgatgaaatatttgcagtagcaactaaagaagacgaaatcaagcgcagctactttgcaggacttgctaccctgccttatctgggctgggcattaggcacatttattggtgctattcttggaaatattcttccagaccgccttatgagtgctttaagtgttgcaatctatggaatgttcgttgccgtggtcgttccagagatgaagaaagctcgccccgtcctgattgtcgtaatcattgcaattatacttagctgcttattctactacataccgcttctttctaagatttccagcggtataacaataacaattgttgctatcacagctgccattatcggttcaatattcttcccggtagctgacgaagctgataacagcaataattaatcttattggaggaacttatgaaaaacagtattttttttatatatctgcttatacttgcaggcacaacctaccttataagagttatacctttcactgcaattaaggaaaagattaacaaccgctttgtccgttcttttctttattacataccttatgcagttcttacagcaatgacaattcctgcaatattctatgcaaccagctggtgggttggtgcagctgcaggacttttgacagccgtaatatttgctttgaaaggcaaaggtcttacaactgttgctatagcgtcatgtgtagcagtatttcttgttgaacttataagattctaataattcataatagaaatgaaatggattttaattcttctttccaatatatgattcatataaactgtaatcactattaacaataagttcttctgggaactgtgtatcttctataaccttataggctctgtcaaattcacatattccctcttttatatgtgcatcacttcctatagatatgcagactcctaattccttacatatgttaagcatcttaacatcattctcaaaagctccttgtcttggaccatccggattcaatgatgtattattaagttcaagaagcacatgcttttccttagcggcctttacaagcttttcataatcgacaggataccttgaatcatcagggtgtcctataatattaacatatggattatccattgctttaattaacgcattcgtattctgctctatacttccgggcttgatacatggaatatgaaggcttgctattacaacatcacagcccttaagtccatattctttaagatcaatatttccatcatagtccataatattagcttcacaacccatatatatcctgacaccacatttttctcttggaattatcttcatattagaaaaatataatatacctgcgcttcccggcatcttgggtgcatggtcagttatcgcaaggtgcgtaactcctatacctgctgcgtaagctgccatctcatcaattgtgttatatgcatgaccgcttacaagtgtatgagtatgtgtgtctattgtgtatttcataattaaagctcctgattacctgttctttctttcacataattctccagaacattaacagttttctctattcccagaggactgctgttgatacacatgtcataatatgttgcatctccccatttaccttctgagtatctgttatgatactgttttcttgttctgtcgtgtctacgcattttagtatatgcctctgattcggataagtcaaaatgctccataactctctgtatcttatgctccttatcacctgttacaaatacggatataaggcagtcataatccttaagtacattctctgaacatctgccgactactacaaatgattctccgctctcagctttcttacggatataatcaaactgaaactgggcaataatctcttcataagaattggtgtgattacctacacgcctcgacaggagacggtttcccggcttttcatcatatttgtgaaaatctgacacatcagcattcatctgttctgcaatctcgtccaacatgcatctgtcataaaatgcaagttctaatctgtcagccagcttccttgctatctcatgtcctccacttccatattcacgacttatagaaataatcaactgttctcccataaaacccccatttctgtacacattttgtgcacgaagaattaacaataccttacaaatatgcacaccatagatataagcacaactattatagttgccggaacagctgtgcggcaatacttaccccaaccaatcatataaccattcttagctgcaactgatgttccgacaacattagcagatgcacctataggtgttgcacttccacctacatcagttcccatagaaagtgcccacgcaagaacagaaaggtcaaccccttgtgtcgcagccaaactcttaataaccggtaccatagttgctgcaaaaggaatattatcaataagtgcacttgcaaatgctgaaataataataataattgcaaccataagtttaagattacctttgctcacacggcctataaatgcagcaataatctctaatattcccgtctgttcaagcccacctacaacgataaacagtcctaaaaagaacaaaagtgttttataatcaatagacttcaacatatgtaaagccttcctgcctgatacaataagtgaaaatattgctataacaagtcctataaatgcaaccgtaagtcctgtcagcgcatgcgttacaagcattacaactgcacacatgaatataacacagcttaatgcaaaatctcttctgttagtaatagtctctgccggacttggcatagattcagccagtttatcaatatctggtgatgattccagttcttttctatatgctataagaaaatataccacaataaataccagactgattactgcaatcagtcctgtatgcgtaataaatgttgaaaatgaaaagttaagtgacgtaccaataattatattaggcggatccccgcacattgttgccgagccgcccagattagcacagaatatctctgataaaatcattggcaccggattaaactttaacagcttggcaagctcaatagatacagctgcaaggaacaatataaccgttatactgtctataaacatagccaatccaaaagacattaccataaatgtgataaacaatgctcttgtacgatagtgtacagccttagccagaagcatacacagccatctgaaaaatccggcagcagccataacctcaaccataatcatcatacccgcaataaatataatggtcgaccagttaatccccgttactgcctcttcagcagctccggactgataccagaaacctgttgtaaatatgctccttaaattaagagtaccaataaccgcctccggcgacttcatgataattccaaataccccaatcagcgtcaatgcaccacatccaagcgtcacataatgcctctctatcttatcaagaactatcaatacaaacatagaaatgaaaataattaatgccaatacctgctctgctaacatattaaataacccccatcgcatgttaaattaataacaaacctttaactgtattatacaagcatacataactaatagcaacatttttccatttattctgtctttcaataatacaaaaagcaccagaagaatacgtttcattcgcttcttatggtgcttctggtttaaatattatattgtatcagcaagtcaactattccaattacttaataagactttccttaatcttaacaactgccttatggatattaacaggctcatccattgtacagttaggacggtggatatcattagtaaagtatactgtaaattcaccaggatgtaatgtaacgaactgctcattctctactgtctcataaaagatattgtctttaccagctggctcttcacctgtaactcctggaagaagtggtgcatatccctgaacttcttttcctgtgaaaagatactggatatcaatataatttctgtgactctcagcacgcttgttctctactggtgcagttgtctgatcctgaataagaacaaaaatgttatctccatcaagttcatatcttccaactggaagctcagctgtctctggctttgcaagaaattcaagtgcagtgttaatagctgctggatactggtagttacctttttttgcgttaagtgatgcgtaaatcattattattttacctcgaatctgttaaaattttatacactaaatatatcattatcgataaaaagtttcaatatttttcttaatattcagcctttaatgttcagcttttaattaagccttttaattcatatctgattccacatgtgccttgttcaaaatacattacaccatcttctcaacagcctttacccatgcatggttaggatcatcacaaggagtaagctgtcttgtgtcagcacctgccattacccagagataatatacctgatatcccggtgctgctgctactgggtgatagccattcttaattgcaacgctgtcaccattctttattatgtaactctctcttaatgacatatcgtcactgtacattacctgaattccaaagccctgacctggattcaccttgaaatgatagatttcctccatatttacctcaaatggaagattatctgtatcatgcttatgtgatggataacttgaccactgtcccggcatgctgtaagtctcgccaagcacgattctgtcaacctttccctcatattttgaagtgataatatcattaacatctctctgccagttaagcttgcctctgtgttcagttgtaacatcacctgcatctattacaaaagcttcatacttctttcttgctttaaccttgcacacaccgatttcaagcatcatgcttccggttgctgtaacttcatacttagaatctcttggaacataaacagttgttggcttgccgtcaaacacgcttcttcttgagccaagcttgtcaaatgtgacatcatcaaccttaacactgcatgttccctgtaaaataacaagtcctatttcatattcccctgattcataaaccgcattttcacccggctcaagtcttatcaaatcaaaacctattaattccaagccagcttctttatctacaacttcctgataacccttgttatcattgccttcataaaatcttctcatgttcgtatctccttataaatagatttaatattattctattatctcattggtgttgtatcaacagttatttttaatttctatgcacttctggccagtcctcaaatcttccgttcacaactgcatgcataattctgtccttagttcccggattatctctattaatctgctccataagctgcttggcatattccctcttagtcgaaccatcaactggacaggtgttcttaacaaccttgattccctgattaatcacaaaattagctacacccttttccggcacatacatcattggccgtataaccgtaacccctgcctccggcagatatgtaactggtggaaatgcgtaaaaccgcccttcatatataagagacattaatgctgtttctataaaatcgtccttattatgtgcatatgcaatcttattgattccaagctctccaagcctcttatacattgcgccttttctaagcttcgcacacagtgaacatggtctttcatctttattatcctcaaagacaatcttcgcaatctctgtatcaacctgttcatatggcacatttatgctctcacagaactgcctcactcctgtaaaatccattccctcaaagccaacattacaggtgattgcatatagttcaaacttcttcggataaaatctgttaagtatcttcattgcatgcagcaatgcaagcgaatccttgccacctgatactccaacggcaatcttatcgccttcctctatcatgttgtaatcttctattgcctgtcttataaggcttaataatttctgttgttgcataaaatatatcctctgttgtaaaaaaatagccaccatctcatcttcagtatcaactaaaatccattctccctcccccagttacactatcatatattaaattgtataatatccttatgtggattagtctgtgacaatccaagccttactattttcccttttattggaacaaaatgtgtctgtaatactctcattgccattatcatctgttctttttcaagtttctttcccaatgttatatgtggaaaccagttatatggtttgtaacaacgattaattgttacatcttctcttacagaaaatatatcatacacatcattggaaagatgcattaaatattcgtccataacaggtgtagcatacataacatacggcagaaactgcccgattgaaaatatatttatctctcctgcacctattttattaagcttcatgaattcttccttaagattatcaggttttcttgtttcgaagcttgaaattgtcagatgcggaggaacattattctcaatcatataagtattacctgtttcttttgcaatattatcaattaacctctgcaatccctttgttacatgttcatcaaaatatgctgatataagatacatatgccacctcattattattaatcacctatgtcaaactctctggcaattctacatctattactatttttctttatctatatgtgaagcaataaatttcccaatgattgcaagtatcaaaatagagacataaaacctcggatcacgatgttctccatataaagcaaaccaaataacgattgaaaataccaatatagtgtatactggcaaaaagaattttttcataagtactgctcctttattcggtaaactggaagttcacacacgcatttgcttctcgaatgcaaacattccttcattgccatctccaacaaaagttagtccttttcaaatatcagaatcttctgcgtaaccttttttgcaatcggtaataacgcaaaaagtctatatgcaagtgaaaataattccatgccgcgaagaatattatcgtcttttattttgtgatatccctctgtcatattcccaagttcttcaaaatgatctgccccgaaaacaaattttgagcctgtttgctgtatggatttttctattccttctttctttacccatgtctttgccagacattccataagaatataggcattatcaaagttatcctttattatttttaatatcttaccattttcttctgctgtcagatacatggataatccttcaatgataaaaagcattttccctcgcacttttacttcttttgaccatgcagggtcaagtgcagaaattcctatcgtagaaacacgtcctgattcctcgaaaatctgattgcggattgctatcgtttctggcaggtccagattgtaccaggtgattttaccattatccatgcgataaaatctcgtatccagaccacaggcaatattgaccaccgtacaataaggatttttctctataaaattctttactaattcatcaaaaactaccgttctagcaattacccctttccccatagtagaatccctagccgctgtagaaaaatcataatcaattttgtcgactaattctaccgcctttgcatcatagaatttattatgtttacttttggaatattgggctctggcataaaagctctggagcattgtctcagcactgccactgatagtaggttttatttttttactcatacatttaccttttttgcaatataattagtttcagctaacttgattgtaacacattttatgaaaataaacaattcaaattgacgtgtctgtcctcaatcattttgtccggtctcaactgagccagatgcaactgaacaaaacataattccacacgaatcaaaattggtctactggatcaattattgatatgcaaggcaaaagaaagacagaaagctcatatctactctctgtcccttcttactgtttttcttcttaattcaatatgatgtcacctttgggacagtccccataaacttcttaaactggaagttataaacatctttgcaaatataccatatctattaactgtacaccacactcataaattgggtggtcataattgtccgtaaagaaattcggaatattgtgcgaacggacaaatccgcatttttcataaaacggtacggtcaacgggctgtcacctgttccaacttgcaaaatagaatattcatctgcatatttacttgcaaggaagtcaattaatgctttgccatagccctttccctgattttccggatcaactgcgatattcttgatttcaagtatttcattaccttcatcggtgacaacacattcagcttttacattaccatcttcaagtgcatacatagtacctttttcaagatagcgatcaatcatattttcctgctcatcagctaatagcaataatgatataaactgctttttattctcattcacttctcgtattttcatatccattactccgtcaaattggaatttgtatggctcaactccttatcgaccggccatagctcgtttataaagtagacctccttttataagtaacaacagaaaagccactgttactgcatatggttctctcgcaatcgccagatacaaaacagtaataatactaagccctacagacaaaaaagtaatcaccttttttcccttttcaaatttgaaattgaccattaaaatattcacaattccaataatcgttaatgcgataaaaagaccccagtatgtcatacgaatccaaatttcattatctacatactcaataagacttactgaatagatatatccatcaaccggtttggaatacaatggaagaaaaataagcatcaaagagagcaaatcggtaaatccaaataacaagtcacatagaccattgagatttgacttgttttctttttcagcaatcaaaaccaactgatctccggataacagctcatcaatggacacagagaaatatctggatatttcctttaatgaatctatgctcggatatcctcttccggattcccattttgaaattgcagttcttgaaacaaataatgcctcgcctagttcttcttgtgtcaaacctcggctctttcttaattcctgaagcttttcatggaattccacctcctgcacctccttttttatttcacttttttattgttagcataactactgccttataaacagtaaataatccggcacttaacaatacaccacccacaatatccgtaaaccaatgtactccggaaatcaatctgccgataaccatgaatgccgaaaaagcgattgccagaatcgtaacgattcttttcactgcaatgcttgacagtctacgctgaatctgttcaatcaaagtcggcatcacacacaataccagtaatgtcgttgaagaaggataagaagcctccataactccattgattaaaattggtctgtaattgattgggatgatctcaaaaatgaagtatgccagtatcactataacataataaactcccaggataatgatatcgggatccactttgaagagacttcttctctttattaactgaaccagtccaatacctgcaaaaatcaggcatacaactaaaggaatcagacccatccaatcggtaatcgtataaattgtcatattaacatttgttaaacgatgaaaccagcaattgaatgttgcaaatccaatattcgttgcattctgccccagtggctgcacgtctaccatctggatcaaagctgtccatattgcaaacgctataataaatatacctcctaaaaataaaacttgttttccattctttttcatcattatacgtcctttctatattggtttgtcttttcgacgatttcaccttatcaaaaagcgtaaaatgacgtaagaatcgctctttcacatgtatgacacgattcgtatcatccccacaaatgcgtgattttctgtatattttcctgaatacctattcctacaaatttcgattgttcgagcttttcaaatactaacgtacttaattctgttcaataagtgatttatagtagttaccaaagtcagcaagtgaattaacaattggaagcatttttgttcctagttccgttaatccgtattcgactctcggtggctgctcatggtaatcgtggcgatatgccagtccatcactcatcatttgtcttaaactatctgtcaaaaccttttgtgaaataccatctatacttcgttgtagctcattgaatctccatgggcgctctttcaagttacgcaaaatcagcagtttccattttcctccgatgagagataccgctgttgcaactgggcattccggtaattcttcttttgctcgcataattctcacctccgagtctattgtaacacattcaattttgagtgtacagttacaaaaaggtgcgtacttgtttttgtatgtgtctcacactatactaataccaagcaaccagaaactacaaatcaactatggaggtattattatgacaaattacacaaaaacaactattggaaaggaaaaccgaattgagctgcatgaaaagttgtctttaacaggtgcagaaatcagttta

SEQ ID NO: 8508 - DNA, 559 bp, Unknown
  gut microbiota DNA sequence
taatgggaactgtgcttatgcgtccgagtcagggtaaaaatgtgctgacacggcttactgataagctgtatgccggatatcagcatctttttgcaaatgtgccggttgttctcaaggagattcacaagctgattgtgacaagcaggggatttacggttattgtggtgcttctactggttgttatgtattttatcagttatggaaagatggctttctcggacaactccagagagcgtgacaggatatatcttgagaagggcggtgctgattattcgcagatatctgccctgattgatgagcgcagagctgattatatgcaggctgtccagaaaagtatggaagcttctgaacagtatgagaatggtgagattggaattgatgagttatcgcagattaattcgactgtgtctatatatgcgtcgcgctatgcttcggtgagggaatttgagcagaagcgggaatatcttgagaatcttaaggaagagactggaattgacggatatatgatgtcggacagaggatacgaggaaatattcggcaagtatggaaaggcaaggga

SEQ ID NO: 8509 - DNA, 145053 bp, Unknown
  gut microbiota DNA sequence
attatggctttgcgaacaatatcggtattcatggttcttcatatgcaaatactcttatggcagatgttggagaagaattatattttcagaaggttcaactaagaatattaagataaccacaaaggatgacattgcaatattcaaggcaatgatagatatgcaaagatcataagtaggagacaaacaatgataagagttagtgttgtaatgcctgtttataatggcgaaaaatatttaaaacagtctatagagagtgtaatacagcagtcctataaagattgggaattaataattgtaaatgattgttcaacagatagatcaagagatattatgcaaagctatgtggaggttgatagccgtataagaatagtagataacagtaacaatttaaaattaccaatgtcattgaacgcaggattcagggaagctagaggagagtatcttacatggacatcagatgataatctctataaagttaatgctcttgaggaattggtaggctatctggaaaataatccagaaataggtctggtgtactctgatatggattacgttgatgcctcactgaatttcataaaagagcagagacttgaaccagagatgcttctttattcagattgtataggtgccagctttatgtatcgtagggaggttcttgataaagtgggggagtatgacccagacatgtttttagttgaggattatgaatattggattaggattagtgaacagtttaagataggtcatttaaataaaaacctatatacatacagaatgcatggcagtagtctaaccgaaacaagaaaaaaggatattaataagcaattatatcgtttaagaaatagacatatggaatatttaatatcaaatgttacagggaaatataaagaaatacttttcttagaaatgttgatgcagaatacagacgattatgaatttttatcggctaaattctggataaaagatgaagatataagcaaatatgaatgggtaaggacatctgataggatagacaataataaaagtattgttatttttggagctggcataattgcaaacagggcaatagcctattttggaaaacaaagaataaagtgtatattagataacagcaaggataaggtaggaaaaaaaatacagggaatagatatagtatcattggacgagtatgttaatggtatgagttgtgcaaaagatagccagatagtgatagctgttggaagtaattatgtatcagaaatagcagagcagttaaagaacaatgggatatcagaattttgttggtttaaagctatagaaagttgtgtgaaggagaccatataatgaaaaaaaaaatattatttggtgctggaaaaattggagatgcagcatatgagttatttgatgagggacaagtggcttactatgttgacaacaatttagataatgttggtaatacaaaaaatggtgttaagattataggctttgatgattttaaaagaatacataaggactatgacgttgtggtatctgtaggaaaaaatgccacactagatgtcatgaaacagttaaaggaagcggggattggagaatttactacgtatcaggagattgtaattaagcttaaaagaccacagaataaagatattaattatcttgaatgttgcgatagagcgagaaaatggatatataataactcaattaaaggagagggaatcattaataatacaggattgccagaatcatatccagaagttactggttattatattcctacgctgattaactggggtgaacatgaacttgccagaacatatactacatggctttgcagtatacagcatgaggatggcgcatggtatgatacagaaggaaaggcaccttatgtatttgattcagcacagattttaaagggacttttggcggcaaagcagcttggaatggatgttgatgataacattaaagctggctgtgaatggattataaagaatattaatcaaaaaggaagactcacaacaccaacaaaggatgcatggggagcaccgggaatatgctctgagcttatacatctttattgtttatcaccattaatagaggcaggtaagatatacaataacagatattatattgatatggcagataaggtggcaaaatattatatagataactatagggaagatatattaggctttggctttttatcgcatttttatgcatatgttatggaagcgttatgtgatataggacagacagatttagccagagaagccatgcacaatatggaaaactaccagcatgagaatgggatggttccggcatataaggatgttgaatggacatgctcaacaggaatgttccagcttgctattacatggtacaagttaggagaactggaaaaaggaaataaaacattcgaatatgcaatgcggcttcagaatgaatctggtggctggtatggcagttatacaatgacagataatcctaatccgtttgacaggaataaatgccctgattacttcccacagagtgagataagctgggctgtgaaatatttcttggatgcactgtattataagtgcagattagagtttgagacacaggctccgctgtttaagagtaatctggcaaaggatgatggaagatatcaggttgtgttaaaccagataaaggggttaaaacgcaatggattgaaaatagctgatgttggctgtggaaagggctgctatataaagaatcttttggaagatgttccagatgcacaatattttgcagtagatttatcggaaaaggttatgaagagtattcctaaaaatgtagaaaaaaagcagggaatattaactaatataccatatgcagataattcatttgacattacttatacgacagaggcacttgaacatgctgtatatactgataatgcattaaaagagcttatacgtataacaaaaccggacggaattataattgttatagataagaataaagagaaacttggtgctcttgaaattgataattgggagcagtggtttgataatgatttctttagtaatattgctaaagataatggcttggatttagaagttattccgaatgtttcatacgaggaaggaacaagtgatggattatttaatgcctggattctaaagggagggattaagtagtatgaaagatactgataatttagttgattatgagagaataattaatattaatagagcactcatgtcacgtattacgccaagaccatcattgttctttgatattgaggtgacagaacattgtaatcttaattgtaaatcatgtggcagttttgcaccattagcagacgaggaatacatagatatagatgaattggatagggatttaagaagattatcagagttgtcagatggagaggttcatcatataaatattctgggtggagaaccattattacatcctgaaattgccagaattgtagagatggtcagacactattttttatatggcaatatatatctggtgactaatggtgtacttttaaaccgtatggatgagagattctggaaagcatgtaagcagtgcaatattgtaattgcaccaactcaatatcctgttaaattagattatgaagagataaaaaacaatgtaatagcgcatggtatacagtatcaaagttttggacaagccgctgatggatggtatcatactgttatatcagagagtggagataaaaatgagattcaacagtttttgcattgttctaatgccaataactgtactgttcttgaacatggaaaattatatccttgtccaaaggctgccaaggtaagacattttaataaagcatttggcgatagatttcagcagtcatcacatgattatatagatatatataaggcagagagcttaaaagagataatggaatttcttagtaagccaattccattttgcagatattgtgatacatttgcatctgaaaaaatagaatggggtgtttcacataaagaggattcagagtggacatagaggagtactatggaaaacgaacatattatattatttggggcaggtaaaataggtaaagaggctttagatgtaatcggttcagattatgtgtatgctttttgtgataattctgtaaaaaatggtgaatgtactgaaaagtatgggaagaatgttatatcattagatgagtattgtgcatcacatagtgacaaaattcttgtaataacagcttctttgactagtacggtacagatagaagaacaatgccagaataaagggatatatgattattttgtatatgatgatcttggatattatggattcagccattatggagcagataaattcatagagatatttaaggataaggcaagtcgcctgttcagaatgaaacagattgccagagattatttaaagaaatatggcgaggtgcgtaagttcagtgccataaatgttgagttttatcttgttgattcgtttgaaatagaacattttattcttttttataatattttaaatgagaaaggaattaatgcctattttgtggcagaaccaaagtctatccatgttgatggagattatttggattatgaaagagctattaagattttaaaagaaaagaacttgaaataccatacaatgagggatgcctatgcagatatagcatttactacccaggcagtcagaaatcttgccagatatagtaagaaaacaatcaaaataaatctccagtatggatgctcattattaaagaatgcatttggggcatcagaggaaggtactgccggatttgattataagatgtccaatggacagtttgaccgtgaattatgctgtagatatattgattcggacagagcatatgatattggttatcctaagtattatgatattgcaggtacccatatgacacgggaacaagtgcgtgaagaattaggtatcaagacacaaaagaaaattatagcatatctgccaacgtgggatgaaaatagctcgatacaagtttattataatgaattaaagagtctgaaagacaagtattatattgttacaaagccacatcattgtacatacagactggacagtaagaaggatgacctgaataaattatatgagatttcagacatggttttgcagccagaatatggtctggacaagtttatgtttattggtgatttaactgttattgatgcaaaatcaggggcgacacttgaagcaacatttcttaatgatgacatgaagatggtgtggctgctggtctctaaggatgtgagaaatttattctggcaggaaatcaataatattgttgaacttgttgacaacagggatgatttagtagatgttgtcaataaaacaatggcagaagatgattatattgaatatagaaaagaacacattaatcaatatttttccaagtatgatagaaagtatcttgaaaatgtattgatgaggattattagcgcaaataatttgctgtagaatggatggtgttgtatgccaaagatatcaattattgttccagtatgtaatgttgaaaagtatctgtcaaaatgtctggacagcattgtgaatcagacattaaagaatattgaaataatatgtgttgatgatggctctacagataatagtggagccatattagacagttattcacaaaatgattcaagaattaaggttattcacaagaaaaattcgggatatggtaattcaatgaatgttggcatggattgtgctgaaggtgagtatatcggaattgttgagagtgatgattgtattctgccagaaatgtatgaggaattatataaagctgcaaaagaatcaaatctggattttgtcaagtcagatgcagttttttggtgggagagaatcggttattcttacaatgtccattatgattatcttcaggaatattatgataaagtacttatgggcaacgccaggcatgtgttttacaagtttctcatgaatatatggacgggaatttataagagagatttcttgaaaaaccataatatcagatttaatgaaacgccgggggcatcatatcaggataatggtttctggttccagacaatgacatttgcagatagggctatgtggattggcaagtcatattatatgtacagacaggataatcctatggcttcaattaagagtgaggcaaaggtgcttgcgatgtctaatgaatatgactatatagaaaaaatattgaaagataagaatgccggcagtgatagtgttaaggaatgtaattattacagactggctaaaaattatggcaattactatagaattgctgacgaattaaaggaaaatttcttgagttatgttctgaaagactatgaaaaatatggaaaagacataatggatgaaccatatttaatagaatggtacagaaagatagcagaaaatcctatagaattttgtaagtacacaattgatgttaagaacagcaataaggctgttttggaaaaagcagagtctatagtgatatatggagctggaaaaagaggacagtatatattgaggcatctgtataatattggtgtttatgataagataactaattttgttgtgtctgataatgcgggtatgcagtgtattggtagaatagaagttatcaatatatctgaactggcagataatgaagatgataatatgcttgtaatcatatctgcttcaaattcatgtgaaacttacagagctatggaaagtatgcttcatcagtataaaattaataattatattggaagtgatgatataattaataatttttattccatttgttagggagagggatgttatgagaaatataatggttgtttttggaaccagaccagaagcaataaagatgtgtccattggttttagaattgcgtaatagaccagataataatgtgattgtgtgtgttactggacagcataggcagatgcttgatcaggtgcttatggattttaatattatacctgatatagatttgcacattatgaagcaaaaacagacactgtttgatatcactattaatgtaatgattggaataaaggatgctgttgaaaaagtaaaaccagatatagttctggttcatggagatacttcaacaacatttgcagcctcacttgcatgctattatatgcagattccagttggacatgttgaggctggacttagaacatataacatatattctccatatccggaagagtttaaccgacaggcagttggcattatttctgaatacaattttgctccgacagaacgcgctaaggagaatcttataaaagagggtaaaaatccatcaagggtgtatgttaccggaaatactgtaattgatgcattaaagactactgtgaaagacgattattatcataatgaattggagtgggttggcaataacaggctgatattaattacagcacatcgcagagagaatattggtgaacctatgcacaatatgttcaaggcaatcagaaggattgttgaagaacatgatgatataagggcgatatatccgattcatatgaatcctgtagtcagacagatagcggatgaggaattgggggattgtgacagaatacatattatagagccgcttgatgtaatggatttccataattttatgaagaagagttaccttattcttacagatagtggaggggttcaagaagaggctcctagtcttggaaaaccagttcttgttatgagagatacaactgaacgcccggagggagttgaagcaggtacattgcgccttgttggaacgaatgaggagaatatatataataattttaaaatgttgataacagatgataaagaatacactaaaatggcgcaggcaaaaaatccttacggcgatggatttgcaagtgtgagaattgctgatgtaattgaaaaggttttggaagataaagttattggataataatgtgatgactttatttttagatgtaatagatattgacatttattgcgaattttattaatatactttatatacaatacaatattattaataaaagcagtttttttatattacctgtgcggttgttatattaatttcatataacaatgggcggtacaggggctgtttatctcggttatgtctgtatttcattatgaaaatcttgcttttaatagggtataaagcaggattgtatgataaaatcatagtgaatatatggtctgtttgtatttcctgctttatcggtaatcagataaggagaagggattatgaatggtaacagagagtacaagagtgatgtgtttagtatgttgatggaggataagaacaattggtaaatcagttgattacgttgcttttatcagatggaagaacagaagatttaaagagatctgcttcagataaagaatatcagatacagttattgaaggagtatggtttaatgtagatttaaagcctttggagatgcaatattctctaaaggcttttaataaatattaattaaatggtaatatattgttataaaaattatgtaaaagtaattggaaaaaacttagaagtgaataatgcatgaaaggtatataacagcatgaataccacaatgaaaaatgaacttataaataaactgaatatattgattggtttgcatgaacagattaaccctatatcatcagatgatggtatagagatattggcgcaatgtcaagaatatgcgataaatgtaggaacaatattagaacagaataacgatggtctggaagttgttcatatgttagaggaatattgcgaatgtgtgtataatatgtcgttatataataatttttatgagatagaaaagaaatcagtagcgctgttaaaagatgtatatactcaaatatataatatggaaacacaatatacaatagcattttttccatataaagttgagatgtgggattccttagagagtgtctggaaagcggcaagtaaggacaagagatgcagatgtgatgttgttgttattccatattttgaatttgataagcgggataagcaatggaaatcagcatatgatgggaacagatttccagattatgtacaagttgttaattatgataattatgttcttaaaaatataagaccggatgcagcgtatatacattacccttatgatgattctaataaagttacaactatacatcctaattattattcggacaaaataaaaagttatagtaataaactgatatacataccatattatgttacagcaggtgctatttcagataatcataagcattttcctgtttataagaacatagattattatattgcacagtctgaatattttaaggagtcgtgcaggggtacgactgtgtatgataaaatgcttccattgggttcacctaaaatagataatgttatatataaatgtgagatgaagaataatgtttcagaacagtggaaaaagattcttgcaggtaaaaaagtagttatgcttaatacaacgcttggagatatactgaattcaagagaaattttattagtgaaactcagacatttttttgaacttgtcaaagatatgaaagatattgctttaatatggcgtccgcatccgcttacagaggcaacctataagtcgatgcgagaagaactctatgagggatatatcgaactcaaaacatattttataaataataatattggaatatatgatgagactaatgatatttcggatactatagcaataagcgatgcatatgttggttcagatggaagttcagttattaatatgtttggtgtagcaggaagaccatgttttatatttaataactttttagttgatgaatgttcatatcaacagcaacataggttaaatataattggagcgtatattaatggcaaagatatatattttgtgtcagatatttttccaggaatatttaaagctgaaaatatatgcactgccgtgaaaacacaaggtgagaatatatcatgtgtgtatatgggagatataagagggtgtgaaagccatatatggcagcagccatatgcatacatctgtaatgatgaaagtggaacatatattagtcctttatatggtgaatatatatctttttgcaaatgcaatattgattcgcaggctggacagaataaagacagttatacaattacatgtacagataaatatgatgcaagaccattagggaaaatgtataagtttcgtgacatgctcatgtttcttccgtatgatggttttacaatttggaaatataacataaagtctgaagaatggataattgatagatatacattagctgtgcttgcaaagaaaattaagaacctgtcttatggaatgcttgattataatgcagtgtatgctagagattatatgtggatgattacaggctgctctaattctttattaagatatgaaccatatacaaatgattataagatatttaacatattgaatgatgattataatttcaatgctataagtgaagattctgatggtatatggctggcggatttttgcaaaaatgaattaattaaaataccttttaagaaaaatgagattgatgttgataatattgcaagaataaagattaatactgcaattattaataattcatggaaaaatatgacgggtatgaaaagagagtttaaaacatttataatggttggcgattatattgttttgattccagctttttctgatacaattattagcgtaaataaatatacatatatgcaggaggttattaataaagactttttgtcagaatcggcaaaacagtgcaatggatataatccacaatattttgattctattaggttcgcaactgcagttgacgataatatattaatacagcgtacatatgacagaaaattagctgttattaatataatggataagacatcttctcaatgttatatggaagtgtcggacgaattattaaaaactaaactacagaattcagatggatttgaaaagatgggcagagcagattatttctgtagaagagagagcatgtattttggtataaaacagttcttgtcacagttaagtgcaggagaattagaaacagttgtacacagacagaaggagagtcttaaggatgttgttgctaatcctggaagttgtggtgagaaagtacatgaatatattatgaaatcactgttagaaaagtgataggagaaaatatgaatttatcagtgtgcattatagctaagaatgaagaaaaacatattgagaattgtctgcgttctcttgtgaataagcatgtacagataatagtggttgatactggttcacaagatgatacaaagaatattgcattaaaatatacaagttgtgtatatgattatcagtggaatgatgattttggtgcagcaaagcaatttgctgtatcaaaggcggataatgacaatatattaatactggattgtgatgaatatctgcaaggtgaagagtctgtgcttatcgagttgtgtgatatcttaaacaaatatccttataaagtgggaagaattaaatgtattaatattcttaatatgaataatattaaacaggataaaagctgggagtggataagcagggcttttaatcgcaaattctgtactatatatgggaaaatacatgagcagattatatctaattcaggagaggcagtagaaacatttttatcaggaataattataaatcatatgggttattgtcttgatgatgatgagagaaaagttaaggctgaacgaaatataaaactgcttgttaatagacttgatgagatacgaatgtcatgtgaaaagtctcatgagcaagaaattccatatatattataccaactgggtaagagttattatatggagaaagaatatacaaaggcgtgtgattacttttctaagggactttcatatgatttagatacgaagttggaatatgttattgatatggttgaaacatatggatatgcaatgctgaattccggagcagaaaaagaagctatgtcttttgtaaatatatatgatgaatttggagatagtgcggattttaaatttcttatgggtattatatatatgaaaaatggcttgtttgataatgctgttaaagaatttaaaaaggctgtactttataaagattgtaaggttgaaggcgtgaattcatatcaggcatactataatattggagttatatatgagtgcctgggatataaggacaaagcccttgaatattatgagcagtgtggagattatgaaaatgcacagaatagagaggcatatataaaaaacaattagttttggagggctatgatggtagatattgatggacaggattgtgaatcaataattagggatttttcaaaaggtgcattagtctggtacaatttcagacaagacagcagaatattatatatatattccagacaggcagataaagcggtacttgaactgcttaaaagcaaggaaaaagtggatgattgcagtgtagaacagcttttaaataatcagattgcgggtaatgcatatgattatatagttggagttgatgttattgaagagagtagatatccacaaaagttattaaatatatgtcatggattgttaaagtcagaaggaaggcttgttattggaacagaaaaccgatatgcgattaagtatatatgtggagacagagacccatatactaatcacaattttgatgggattgagaattacaggagattgtcggatgcagaccgggattctatagcaggaagatgttattctatggcagagttaaaatcgatgtttttacaggctggatttgtgaatgataaattttattcagtaatgccatctttgcaggaaacacagcttgtatatgcagaagggtatgaaccggttgaagaactggctatgcggtatttccctctttataactatccggatagtgtgtttcttgaagagcagtacctgtatactgatttaataaagaatggcatgtttcataagatggctaatgcttacattatagaatgcagcatggacggacagttagatgatacccttcatgcaaccatatcacttgacagaggacatgataatgcacttgtaaccagcatatgtgaacatgatggagtcagaaatgtaattaagagggctgtttacaaagaaggaatacataaacttaaagagatgcaggataatcttaatgatttgcatgcaagaggaataaatgtagttgattcatctgtcgagaataatacatttgtaatgccttatgttgatgctccggttgcgatgaatgaattaaaggctattgctaaaaaagatagaaatgcattttttaaggcaatggatgatatgtatgaattaattcttgattcatcagagcatacaggggtattatctgaaaaagataggaacagtgcggatggaagagatgttggacctgtacttgcgagaggatatattgatatggttccactcaattgtttttatgatgaatcggctaaggatgctaagagcagattcatatattatgaccaggaattttattgggagaattgtccggcgaaggctgtaatgtatcgttcaataacaattatatatgatggcacagataaggaatttgagaggattgttccaagaagggaattatttgaccgatatggattatctgaatgtgaggatatgtggcagcgtatgtcatcaagatttacagatgttttaaggaatcagaagcctttaagaccatattatgagaataagagagtagatggtagaattctttatactaacagggaaaagattaattacagtgcaaagcaatatcaggaaatttttgttgatatttttgaaagatttgatgattccaaaaagctgattctttttggatcaggcagattcacagagaaatttttgtttcaatttgcagatgattatgacatttactctattattgataataacagtgcaaaatggggaacaacaatgcagggagtgccgattaattcacctgacatattaaaggatattccggaaagagagagacatattattatatgtattaagggatataatggtgttgttaatcagttaaaagatatgggaataaaggattatcatatatatgatccgggaaatgattatccaaataagagaaaagaacaggtggcacaaagactggcagcagtacaggaaaataattttgtgacaggattgaataaatcagacatagataaaccgtacaatgtgggatatatagcaggggtgtttgatttgttccacataggacatcttaatatgtttaagcgggctaaggagcagtgcaggtatctgatagtaggtgtggtatctgatgaaggggtaagacttaataagcaggctgagccttttgtgccttttgatgaaagaatagagatggtccgttcatgtaaatatgttgatgaggctattaaattgccacttgatttctgtggaacgagggatatgtttaagatatatcattttgatgtacaattctcaggaagtgattatgaacatgatccggcatggcttgctgagaaagagttcctggagaaaaatggttctactatggtattctttccgtatacgcagagtacaagctctactaagctaaagaaagctattgaaaacaggataaataattgatgaactacaaaagtgggaaaagaatattgttctttttccactcaaagtgttgataaaaccagtaaaagacaaatagggggtatatcacagaaatgaagcaaaagataaaaataaatgttttgggaagttgtatatcaagagtatctttactcgatggagttcaatcagaacatggaatagcagatgatagattagaactcggctattttctagacaaacaaaatattgttgcagctatgatgccacctgcctttacaaaggaagaggtgcaagcaattacagtagatgaactctatgataaatcgaggctgcaatctttaaaacaaacacttaacaaagaaactttaaatttattattagaatcggatgcagattatcttgttatggatttctatgacatgggcataatgtttttgtcgtataaaaatacatgtatggcaactcaagctaatgagttttgtcgtacaaatttatttagaaagtatcaggacaaaatgtataaatggaatttatacgaattgccaatatggatatagtatacatatgttgatttattcatggagaaaataatgactaaatatgatagtgaccatataattcttaatagattcagatgtaattcatattatcttgatttggatggcaaagttaaatacattccagacggttttagaatggcgatacagcccaatcctaaatacaatcagaatgcatatgatttagagaaatactttatagaaaaatataatccatgggttatagatttgtctaaatattttatgggagacagaaattgttgggataatcttaatggagcacattttgaaaaagaattttatagggaaacatttgaccagataaaaagaataatatttgaaaaagatgcaaaacgatattatgatgaaccagacttttttaataaagatagaagagggtggagcgaagatatagaaagaaagtttgatgtagatgctgcattatgttcagatggagtattctataatttgttgaattcaggcgatatattgtggcttaatatattagataaaatgaatatgtatgcacctgataataaaagggtaatagaacttgtagaatggatgaatgaaaataattatgaataaattttaattcaggggttaagtattgaaaaattcctccgatatataaaacataaatcagaaatgataataaacatatagtttaattataggaagtttatatttcaaggaggaatttaattatggtagtacagcacaatttatcagcaatcaacacaaacagacagatgggagttgtaacagatgctcttcagaagtctacagagaaattatcatcaggatataagattaacagagcagcagatgatgcagctggtctttcaatctcagagaagatgagaagccagatcagaggtcttaataaggcatctgataatgcacaggatggtatctcacttattcaggtagctgaaggtgctcttaatgagacacattctatattacagagaatgaatgaattggcaacacaggctgctaatgatactaacacatcagttgatagacagtctatcaaagatgagattaaacagttgaatgaagagcttgacagaatttcatcaacaacacagttcaataagcaggacttattaacaggtggattctcaggaaagcttcaggttggtgctcttgaaggacagacaatggatgttaaaattagtcttgcagtatcagcaaagggcttaaaggttagcgctgtagaggtaagtactaatgctaaggcaggtgctgcaatgcagtctattcaggatgctattgaatcagtatctaagcagagatcaaagcttggtgctatccagaacagacttgagcacacaatcaataatcttgatactaacgctgagaatacacaggctgctgaatcacgtatccgtgatacagatatggctgatgagatggtacagtacagcaagaataacattctttcacaggctggacagtctatgcttacacaggctaatcagcagacacagggtgtactttcactcttacagtaatatacaatagaactttaataaaaggctggaatttagcagttatatttgctaagttccagccttttttagtataatagcatcaatagaacggatgaggtgttgaaagtgaatgtattgattttttataattataattttggcattgaagatgttaaagaatgttttgaaaaaaagggatataagttcaaagtggtatggtcagaacaattaaaccagagaaaatgtacagaacttgatgatatatttgaaaaggaatttgatgaaggtgtagatggacgggcatttgactgcgtgtttacttttaattatagcccggttatatctattaactgtaataaaaggaatgttccatacatatcaattgtttatgatagcccgcaaatattattgtattcatatacaattattaatccgtgtaactatgtgtttatatttgataaaacacaatatatggaacttagtaatgaaggtatagaaacagtgtattattgccctctggctgttaatacagatagattaaagagtatgtttaatgatgaatatgaggaaaaaaatcagttgtatgctggagatatatcatttataggttctatgtacaatgaaaaacataatctttatgatagattatgtggagttaatgattatacgaaaggatatctggacgcaataatgaaagtacagaggagcatatatgggtatttctttttagaaaatatgctgaaaggtgatgtacttgatgaaatgatgagagtgtgtccagttaagcctaatgaggatggggtagaaactgtacagtatgtgtatgctaattatttccttgcaagaagaatggcgactgatgaaagaacagacatattatctcgggttggcagggaattaggcagggaaaataaaattaatctctataccccggatgcatccgtaagattcataaatgtaaataacaaaggaactgtagattattataatgaaatgccatatgtattcagaaattccagaattaatctcaatattacactcagaagcattaaaagtggaattccattaagatgcatggatatatgtggagcaggcggatttctactgtctaattatcaggcggatttatatgatgtattcgttccaggtgaagatatggttatatatgattcaattgacgatttaatgaataaatgtaaatattatctgtcacatgatgcggaaagaaggcagattgcacagaatggatttggcaaaattgaagaaaaacatacatatgatgtcagatttgaagagatatttaatagggtgtttaattaaagggaggatacatggctaaaaaagattatgtgcggtatattaatagtcttctgaatgagaacacagaacagtcaaagcaagagttatcagatttatttgccgatgaagaattcagaaagaatgatatgttagaagatacaaggatggggtatatgtatatagcaatatgtatataccgggaagaaaaagctgcacatattgaagaaaatattttgatgaatgtggatagtctgggagaaatatgtgatttaatatgtgatattaaatttcttttgtggagaattgagtttcagacagaatcaaaggcactgatgcaggcggtaaacaggatagaagaagagaaactgtcagtgatagccgtggagtatattataagaacagcatgctttgataaaaagaatgttttattaaaattgtgtgagtgttacataagactgaataaagaagataaagcatttcaaatgttgaaatatggaaaggatattaacagataatattatgaatgataaaaaaatatgttttattatatgttataacgatgataaatatattagcgaatgtttacattatataaacagattgactgtaccagatggatatttattagatgttttaacggtaaagaatgctgactcaatgacttctggctataatgctgcaatgaatgagactgatgcaaagtataaaatatatatgcatcaggatgtttttatagttaatattaatttgctggaagatattattaaaatattcgaagataaaaatgttggaatgcttggtgtggtaggaacaccgaacatgcctgagaatggctgtatgtggaatggtcctagagttggaagagtatattcaagtaatgtcttaacagcgaaagagtttattgcatctgacatgaatgaaaggccatatatggaagtggaagcagttgatggactatttatagctacacagtatgatatcatgtggagagaagatttattcacaggctgggatttttatgatgtgtcgcagggagaagaattcagaagaaatggttataaagttgtagtgccatatatggataaatcgtggtgtatacatgatgatggttttcttaatttatcaagatatgatgagtttcgtgatatttttctgaaagagtataagtgatagataagtattcccagccatgtaaaccaagtcttttgaatgagtcgataacatcaggcgcacatatgctgttatacctgtaaaaatatattttcattaacattctccttgaaatggttttgctataaaatatttaagcagtttttaagtatcttttatttctgcaagtgtaatatattgaaaggctttgaattgtatatcacttttgtgtgatgatagcttagttagtgcgtctatgaattcagagtcttttttggataacataggtgttacattggatgcaactgtgttgataacattaaaatcattttcttcatacatttttataatttcattgtatgtaaagaagtggatatgtgttttgtctaataggcctgtgtctgtataatgaaagttaccattgataagttcatgtaataccgtaaaatgcataaggttaggtatactgctgattattttaccttttttctttaaaatgtggcggcagttgtgtatgacttttgatggattatgaagatgttctaatacatctccaaataatatataatcaaatttaatgtcattccagagatctacagattcttctatattagctgtttttactgaagcaatgtgcgaagcaatttccgcagaaatagggttaatttctataccatatagtgttgagtttggataaagtgcttgtatagccagtaaagttgcgccacaatcgcaaccaatttcaagaacattaagttctttatcaattggttcgttaatcatgctgataagattactgcttggtatagtgttaatgtaattcatgtgccatttttgtcttatatatgctaaatcacaattacggttagtggggagataataggaattatgattgccaatataatattgatatacattatctgccatataagtaaattgatcatttaaaatgttatttatacagaagtctgtcaaacataactcatctgatataatttttgaatcaaataatgtatgttcagataataatttatggctcaataaaatagtgttgatttcaggtttaataattttgaataaatttattttagatacatcggtgttatttacgtagtttaatgccgctgaaaaagagtgtatatcattgctgatatctaatatattttgcgggcagacggcatatataccattatcagggtttaatgctgacgaaagtttttttaatgtttcaggaagaagaaagctgtcagggtctaatatgagtatatcattttgagtattaacaaattctgaaatgcatgtgttgagaattaaagaataattttcaattttatcatcacatattatgtagtttaagcgtgattgagaaacaagaaaatcgcataaattatcagaagagtggttatcaactattattgaatccatactgatgttgtgaattgaagataattgttcgatctgagatttaatgaattcttttttgttgtgcgcaatcattataacagagatattattcatatatttcctttcattgacatgtgttttatagctcttattatatactaatttagttggcaattaaatttaaaaatgataatataatacattataacagttattgtgtagcataacaattgacgatagaagaacggagaaaatcatgacagataagaatacattttataatatgttaaagagtaatgccgagagccagccagacgctgtggctgtcgtttatgatacgatgaaagttacttatgcgaagctttttgatgatgtgactaagaaggcattgcattttcagaaatttgaaggaaagaggattgcaatatttggaccagcttcatacagatggattgttaatatgtttggaacgattgttgcgggaaaggagcttgcacttgttgatttcttcctgcctcatgattcacgggttgaccttcttaagaagactgaggtggattatacactgacttctactaatcagtatattctctctgatgagaattcaattattatatcaagtgctgagaaagataatgttgacgggcttatatatgatgagaatacgccggagggggatattatcatgtttacagctacagctaatgaatgtgacaagccggttgttctgtctattgataatatccttaatgcggttatggcgataaatagcagggttgaatgtacaagtgatgatattgtgcttgcacagattccgcttcataatgaatttggatttatatacagcctcatatggcctctgtataatggtgctatggtgtgtataggcagaggcttaagacatgttgatgcagatacttattattataatccaactattcttataggtactccttctatgattgactatcagcgagctataagtgggtttaataaagaactcaatactattatcataggtggtgcaagctgcccgttcagactttttgagaatctctgtgacagtgatttgaaggtttataatatatatggaatgacagagacttcgggttgtgtaggggttaatgagctttacgatggttcgtatactctttttgataataatgcagtatctattgctgatgatggagagattattgtaagtggaccatgtgtcatgaaaggctattataatgacggggagtctactgaaaatgtattaaaagacggtgtgtatcatacaggtgattacggaaggattaacaatgtcggcagacttgttctgttgcagcgtaatccggatattattctgctgcctacaggtgagaagataagccgtgtaagaactaatgaacagattacagctattaatggagttgcagaaggctttataatattttacaataacaggcttacggcggttattgtgcctattgataagagtgcaactgaggatatattcaagagacgtattgacaagtataacgagaaaaaaggttaccgctgggaaattcagaagattgtgttaagaaaagaacctttgccaagaaagtctgatggcacggttgatgaggaagctgtatgtgagtttattggtgattgattaaacgaggcggtgctggtttgaagtttgataatgatttttttaatacagaagtaagagagggttttgaaatatcttctatgatgaagagagcatgggctgcgcagatggaagtatttcaggttgtatctgatatatgtaacagaaatggaataaggtattttgcagactttggtacattgcttggggctgtgagacataagggaatgattccatgggatgatgatattgacatcagccttatgagagatgaatacaatgaacttatcaggattcttcctggggaactgccatacggctttgtagttgcaggcatgtatgctgattgtgagcgtttgcaaaatgcagcatttgttccacagttaagagttattgcagatgaagaattatggaattttaatgattatatgaagtattttcatggatttccatatcagagggctgggatagatatttttccattggattatatttctaaagacaaagaatttgcagacatgcagaagcagattataaagcttggaatggaaattttagggaaatggaatgaattaaatagagagggttctttagataaatttgtttctgagtttggtcaattatgtaatgttaatattgaattaagagaagatactaagaattatatatggaaactgatagataaagtatcttcgttatgttacagagatgaagctgactatgtaagcagcatggctttatggattgataatgacagttataagatgcgtaaagagtgctttgatgatgtaatagaaatgccgtttgagaattttgtggttaaagcaccaaaaaattatgatgaagtgcttaaggctgagtttggcgattatatgattccagtaaaaggcacagcggatcatacgtatccattttacggtcacatggagcaggaattgattaagcagattagaagagttggttttaaaggcagtgttgatgaattttgtgaagaagttgccagtggaaggttaagagtgtagcattttcacatgtgattaatattaactttccaccaatccagccgatatatattctataagttcataaagaaaggtgattagaatcatggatgattacagacagcagcagatagatgtacttaaggaagctgttccttacagcgagaagcttattggagcaatagagaaagtctcagaagaactttcaggagttccttttccagagactcatgatgcggtgaatgttattattgaagggcttaactggctttttgaagtatataatggaactaaggatattattgaggctggggcagttgacgaggcagaagctaattctggtgttaaggagctttcagaggctgtaaaggctgatgatgatgtggatgtttctaaagcacttgtaaggcttagtacatttgttaagcagttacatgatgcaggaagcagactgattaatgaataataagaaacataaaggcatccgccggtttatgtattacatgaaccagacggatgccttattttatattatggtagttagatatagccattaaacatcatgcctgagtaggcagaaagattataagggtcattcacaggcttatgtggattcttataagcgacaatcttattgtttacatagttcatagggttgatggagatatcatcagcctttctttggattgatttcttgaatgaatccaaagcgttaaatacatcggaaagtgtgccgtcagaagcagctttctgaataaccaccttattaacttcaagcgaaccctcatcacttactgtaagtccattgcgttcaagctgtggctggtaagccttcattattcttgaaaattctttctttaacttggcattgccctcaaacttatcgttctctttatctgcggcgatggaaacaagtctgttgtagccggaaacaagttctgtaatgctttctgtgattgaatcagcatcatctttaagactgatggttgccggcttgtcagttgtattatgaaatgatattgcaaatgttttgttaattgttatgtcattcgaagcagatgagcgttcttctccattgacagaaaagattgcattgctaggatactgtgttacacggtcaagaccatatgtttcaatgaagttagtgttcttctccatagtaggctcatcaaaaccttccacgaaatcaggattgtctgtctgaatatcgttattaggcctgatgttaaatattgtaggcttgattacacttacacctgtcatgtctgattcaatgttcagcgcagtattgccgaggctgtcttcacttacagaagcattaagtccgatattggaacggttaataagtctggcaagcttgttctgtatgtcagaattgctctcttcttcatctacattaaactggaattcataggtcagattattgatgttcaaatcaaatgaataatctcctggcttaactgtgcggctgttaggctgcaggtaatgtccggtattaatctggcttgttgcaagctggcggacttctatatcaaggcttgtatcatcggcagatgagctgtcgcctataaatgtggctgttaccgcatcaggattgtctgacactgctgatttcttaaataccatgccgtgaccgtcgcttcctgaaagctcattggcaatgttacttaattctctggcattctctttaaggtcgattgcatatttctgcgcagcctctgacatatctgccttatatgtaggagtctgactgttagatttcagaactctgccatatgtattctttaattgtgctttagtgtgtgtatcgtactttgagttagtcttatgtccatactgggcaagataatagctgtacacgctgctgatcataacagtcacctccttgtctgtaataatcggtagaaaatgtaaggaaatccatttccttatatatatcgtatgtttttgtacaaatattataatatgaagttcattttttgtcactatattttctttaaaaaagttgttgacgagttggaatgtactgtgctatattagaacggctatggaagcggtcttttttgcgtgcctgaatttcaacaacccaacattgattaggcgggcaaagaaaccaattggtgttttaacacctacaaaaataataattggaggtggaagttgtgcgagtaaagataacattggcatgtactgagtgtaaacagcgcaattacaacatgactaaggaaaagaaagctcatccagacagaatggaaacaaagaagtattgtaagttctgtaaatcacacacattacacaaggaaacaaagtaattagtacagtgaggagtatttcatgggtgatactgtaaaagctaagaagcagaaaaagaactggttcaaaggtttaaaagctgaattttcaaaaattatttggccagaccgtcagtcgcttactaaggaaactgtagctgtattggctgtgtccgtattattaggtgtaatcattgcagttgtggatttaattgtccgctttggaattgagttcattgtaaaataaggaataggtgattgtatggatgacgcaaaatggtatgtagttcacacttactcaggttatgagaacaaggtgaaggctaacattgagaagacagttgaaaacagaaatcttcacgatcagattcttgaagttatcgttccacttgaaacagtagtggagattaaggatggctctaagaaagctgctcagaagaaaatgtttcctggatacgttcttgtgaagatggtaatgaacgacgatagttggtatgttgtcagaaacacaagaggtgttacagggtttgttggtcctggatcaaagccagtaccacttacaccaacagaaattaagaatcttggcataagccttgaggaagaacaggaagttaagcctgttatccagttcgctggcaaggtcggcgataaggttatgatcctctctggtgcatgggaagatacagttggtgagattaccaatattaatgagggcaagcagtgccttacaattaatgttgagatgttcggtcgtgaaacaccggtcgagattgatttcacagatgtgaagttattgtaagaagtagtcccgatcctgggacgtgggagaccaaaatgaattagcttcgctaattcatttgcaagaatcacctaaaggtgattcttgggagatggatagcgggtaatattatgatggtcgccaattaccacatttatttttaggaggtgccaaaatggcaaagaaagtaacaggatatattaaattacagattcctgccggcaaggctacaccagctccaccagttggtccagcacttggtcagcacggtgttaacatcgtagaattcacaaagcagttcaatgctaagacagcagatcagggagatcttatcatacctgtagttattacagtttatgctgatagaagcttcagctttattacaaagactccacctgcagcagtacttcttaagaaggcttgcaacattaagtcaggatcaggcgtacctaacaagactaaggttgctactattaagagagcagaagttcagaagatcgctgagcttaagatgccagatcttaacgctgcatctatcgaagcagctacttctatgatcgaaggaacagctaagagtatgggtatcgttgtagaagactaatctacatttgattcatgattattgtgggaggaaagatagaatccttccgatattaccactaggaggtttataatgaaaagaggaaagaaatacgttgaggcagccaagaatattgaccgccagacattatatgaagcagcagacgctatctcattagtaaagaagaacgctactgctaaattcgacgagacaatcgaagcacatatcagaacaggttgtgatggacgtcacgctgagcagcagatcagaggagctgttgttcttccacacggaacaggtaagactgtacgtgtattagtatttgctaagggtgctaaggctgatgaggctcttgcagctggagcagatttcgttggtggagaggagcttattcctaagatccagaacgataactggttcgagttcgacgttgttgttgcaactccagatatgatgggtgttgttggtcgtcttggtcgtgtacttggtcctaagggattaatgccaaaccctaaggctggtacagttactatggatgtaacaaaagctgttaatgatatcaaggctggtaagatcgagtacagacttgacaagactaatatcattcacgtgccaattggtaaggcttcattcacagaggagcagttatcagacaacttccaggctattatggatgcaatcgttaaggctaagccatcttcacttaagggagcttatcttagaagtgtagttctcacttctactatgggacctggtgttaagttaagcacagccaagtatgtgggttaatcagatttttgattaaaaacggttgacattaatatattttgatagtatactatcagcttgtgagcagcattttgctgttaacataatattttgccgtagacagcaggtccggattcagtattactgatgatggttaaaggtaacacgcctaccgaggatttaaggatttgattaattattccctctctgtcgctggcagagagggttttgtttgtagggaaactatagacgaataatcttcacttaggcaaaatcgcttctatatgaagcaagaatctaacaggaggtaattattcatggctattttaaagaatgtaggccttaagacatctactatcgatgagattaaagataactttgacggcgctcagggcgttgttgtagttaactacagcggtcttacagtagaacaggatacacagcttcgtaagcagttaagagaagctggtgtggtttataaggtttataagaacactttagtaaagagagttgttgctggaacagagttcgagccaattactgatgctcttgaaggaactaatgctattgcattctgcaagacagatgctacagcacctgcaagaatattagctaactttgctaagacagctaatgctcttgagttaaagtgtggcgttgttgaaggaacattctacgatgcagcaggtatcgctacaatcgctactatcccttcaagagaggaacttctttcaaagttacttggaagtatccagtcacctattacaaactttgctcgtgttattaagcagattgctgagaagaacgaggaagttgcttaatcagtttaacactgaattaactatgaaagcagcatagatgctctttcgattttagaataatattaaaaaggagattataataatgacaacacaggaaattattgaagttattaaaggtttatcagtattagagcttaacgatttagttaaggcttgtgaagaagaattcggcgtatctgcagcagcaggcgttgtagttgcagcagcaggtgctggcgcagcagcagctgaggagaagacagaatttgatgtagagcttacagaagctggagatcagaaggttaaggttatcaaggttgttcgtgaaatcacaggtcttggattaaaggaagctaaggacgttgttgatggcgcacctaaggttgttaaggagcaggcttctaaggaagaggctgaggaaatcaagaagaagcttgaagaagttggagctaaggttactcttaagtaattcacttgattgttctaatgaatataataagaaagacagcgggccttcacggctcctgtcttttcttttttctataaatcacatctttattttattatgccagctatggcagaaacactattatctttatacaattctgaatattcatggaaatttttaaaaatcccttgacatatatatatctttgatgtactatggacaatgcactattgtggtaaattgtgcttattctttgcacatttactgataatgtaatatattaatgtgaagaaaactaaggggtgaaacgtcaatggagaaaaacagattacgcccaataacgtcgggcaaggcaatgcgtatgagtttctcaagacagaaagaagttcttgagatgcctaaccttattgaggtgcagaaggattcttaccagtggtttttgaatgaaggcttgaaagaggtctttgatgacatatctccaattgcagactataatggaagattaagtctggaattcgtagattttgcgttatgtgaagacgaagttaagtattcaattgaagagtgtaaagaaagagatgctacatatgcagcgcctcttaaggttacagtaagacttcataacaaagagacagaaagcatcagcgagcatgagattttcatgggagacctgccattaatgactaagacaggtacatttgtaattaatggtgctgaacgagttattgtcagccagttggtacgttcacctggtatttattatgatatacagaaagataagtatggtaagattttcttgtacagctgtcaggtaattcctaacagaggtgcatggttagagtatgaaacagatgctaatgatatattctatgttaaggttgaccgtaataagaaggttcctattactgttcttatcagagcattaggatttggtactaatgcggagattcttgatatttttggcgaggaacctaagcttcttgctactatggagaaggatacttctactaactatcaggaaggtattcttgaactttataagaagttaagaccaggagaaccattatctgtagagagtgctgaagcacttatttcaggtatgttctttgacccaagaagatatgatcttgcacatgtaggaagatataagtttaataagaagctttctttcaagagcagaattacaggacaggttcttgctgaggatgttgttgatgaaaacggaactgttattgcaacagcaggtgagaagcttacaagagaatcagcacaggctatccaggatgcagctgttccttcagtattcattactgtagaagttaaggctgctgatggtacagtatctgacagagttgttaagattctttctaaccgtgcggttgatattactaaatgggttgatatcagcgaagaagaagctaaggagcttggtgtaacagagtatgtatactatcctgttcttgcacagattcttgctgagaatgagtctttagaggatattaaggaagctattactaagaatattgctgaccttattcctaagcatattacagtagaagatattcttgcttctattaattataatatgcaccttgaatatggtgttggtactaaggatgatatcgatcaccttggaaacagacgtatcagagctgtaggagagcttcttcagaaccagttcagaattggtatctcaagaatggaaagagtggttcgtgagagaatgtctacacaggatcttagcggaatatctccacagtcacttattaatattaagcctgtaacagctgctattaaggaattcttcggaagttcgcagttgtcacagttcatggatcagaataaccctcttagtgagattactcataagagacgtctttcagcccttggtcctggtggtctttcaagagatcgtgcaggtttcgaggttcgagatgtacactatactcattatggtagaatgtgtcctatcgagactcctgaaggacctaacattggtcttattaactctcttgcatcttatgcaagaattaatgaatatggattcgttgaagctccttatcgtattgtagataagtctgatcctaagaatccaagagttactgatgaagtgcgttacttcacagctgatgaggaagatgatttccatgtagcacaggctaatgctgagattgatgagaatggttatttcgtaagaaatactgtatctggacgttacagagaagaaacttctcagttcgataagagccagattgatcttatggatgtatctcctaagatggtattctcagttgctacatcaatgattccattccttcagaatgatgactgtacacgtgccctcatgggttctaacatgcagcgtcaggccgtacctcttcttatgacagaagctcctgttatcggaactggtattgagaataagactgctgttgactcaggcgtatgtgtagttgcagaggctgatggtgttgttctttcttctgaatctaacaagattgttatcagagaaaaggatggcaaggcgcgcgaatacaagcttactaagttctcaagaagtaaccagagcaactgctataaccagagacctattgttttcaagggtgatgaggttaaggcaggagatgttattgctgatggtccatctacatctaatggtgagattgccctcggtaagaaccctcttatcggtttcatgacttgggaaggttataactacgaggatgctgtacttcttagtgagcgtctcgtaagagatgatgtgtatacatctattcatattgaagaatatgagacagaagcaagagatactaagttaggacctgaagagattacaagagatcttccttcaacaggttcagacgctgtaaaggatcttgatgagaacggtattatccgcgttggtgctgaggtaagagccggagatattcttgttggaaaggttactcctaagggagagacagagcttactgctgaagagagacttcttagagctatctttggtgagaaagcaagagaagtaagagatacttcacttaaggtacctcatggtgcttatggtatcgtcgttgctgttaagacatttacaagagagaacggagatgaactctcaccaggagttaacaaatctgttcgtatatatattgcacagaagagaaagattggcgttggtgataagatggctggtcgtcatggtaacaagggtgtcgtttcaagagtacttcctgttgaagatatgccattccttcctaatggccgtcctcttgatatcgtacttaacccactgggcgttccttcacgaatgaacattggacaggtccttgagattcatttaagtcttgctgccaaggtacttggatttaacatttctacgccagtattcgatggtgcagatgagaatgatattatggatactcttgatatggcaaatgcttatgctaaccatccattcgatgatgaagagcttgcagcccagaaggctgaggctgagaagaatggcgaagaatatcctgaggatatggttacatttacagcacagtataaagatgttcttaataaagaggtatttgattacctttcagaacacagagatcacagagctgagtggaagggtgttccaatcggccgtgatggtaaagtaagacttagagatggtagaacaggtgagtacttcgacagccctgtaactatcggattcatgcattacttaaagcttcatcatcttgttgatgataagattcatgcacgttcaactggtccttactcacttgtaactcagcagccacttggtggtaaggctcagttcggtggacagagattcggagagatggaagtttgggcacttgaggcttatggtgctgcttatactcttcaggaaatccttactgttaagtctgatgatgttgtaggacgagttaagacttacgaagctattattaagggtgagaatattcctgaaccaggagttccagaatcattcaaggttcttcttaaggaacttcagtcactcgcacttgatgttagagttcttgatcaggacaacaatgaagtcagacttcttgagagttctgaatatgaagttactgatttcaagaaggttcttgatgaaggtaatggatacagaagaaacagcagagaggaagaggcagagtacaaggctggcggtatgtcaacagttactcttaatgaagatggaacagaagatgctgtagattcagatgatgaagctgattttgatatggccgatgattttgatgacgattacggcgatggcaattcagatgaatattaattagaagggagcactataatggcagaagaaattaaatcaaataagtcaatgaaatttgataagattcagattaagcttgcttctcctgagaatattttggagtggtctcatggtgaggttaccaaacctgaaacaattaactatagaacacttaagccagaaaaggacggacttttctgcgaaagaatatttggtcctagcaaggactgggagtgccactgcggtaagtataagaagattaaggacaagggtattgtctgcgataaatgtggtgttgaggttactaaggccagcgtaagaagagaccgtatgggtcatatccatcttgctgcaccagtatctcacatctggtacttcaagggtattcctagccgcatggatctcattcttgatattggtcctaagaaccttgaaaaggtattatattttgcttcatatattgtaattgatccaggtgaaacagatattcctttcaagaagattctttcagagactgaatacagagaactctgtgagcagtacggaagcaaggctttccgtgttggtatgggagctgaggcaatcctcgagctcctccagatggttaaccttgaagaagaagaagtaagacttaaggaagaacttgctaacactacttctcagaaggctgccagacttataaagagaattgaagttgttgaagcatttaagaatgcaggaactaagcctgagtggatgattcttacagaaatccctgtaattccaccagatttaagacctatggttcagcttgatggtggacgttttgcaacttcagatcttaatgatctttatagaagaattattaacagaaataacagacttgcaagacttcttgagcttggagctcctgaaattattgtacgtaacgagaagagaatgcttcaggaagctgttgatgctcttatcgataatggacgtagaaatggtcgtccagtaacaggtcctggtaacagagcacttaagtctttatcagatttattaaagggtaagcagggacgtttcagacagaaccttcttggtaagcgagttgactactcaggacgttcagttatcgtagtaggaccagaacttaagatttatcagtgcggtcttcctaaagagatggctattgagttgttcaagccatttgttatgagagagcttgtaagacgtaatcttgcagataatattaagaaagctaagaagagcgtagaacatcttgagccagaagtatgggatgtacttgaagatgttattaaagagcatccagttatgcttaaccgtgctcctacacttcacagacttggtattcaggcttttgagccaatccttgtagaaggtaaggctattaagcttcatccacttgtttgtacagcgttcaatgccgatttcgatggtgaccagatggctgtccatcttccactttctgttgaggctcaggcagagtgtagatttatgcttctttcacctaacaaccttcttaagccatctgatggtggtcctgttgccgttccttcacaggatatggtacttggtatttactatctcacacaggaaagaccaggcgcaaagggcgagggtaagatttttaagagcattaatgaagcagttcttgcttatgagaacggtgtaattacattacatgccaagattatggttcatgtaactaagaatgttaacggagaagagctttcaggtaatattgagtctacacttggaagacttatatttaatgagattctccctcaggatttaggatatgttgacagaagcaaggaagagaatttattacttccagaagttgatttccatgtaggaaagaagcagcttaaagatattttacagcatgttatcaatactcatggtactacaacaactgcagaggttcttgatgatatcaaggctatgggttataagtactctaccagagctgccatgactgtttctatttctgagatgacagtgccaccagttaagaagcagcttcttgctgaggcagaaaagaaagttgaacagattactgttaaatataacagaggtcaggctactgacgaggaaagacataagaatgttatccgcgtatggcaggagactgatgataagattaaggatgcccttcttcagggtcttgataaatataacaacatcttcatgatggctgactcaggtgcccgtggttctaaccagcagattaagcagttagcaggtatgcgtggtttgatggctgatacatcaggtaacactatcgaacttcctatcaagtcaaacttccgtgaaggtcttgatgttctggaatactttatttcagctcacggtgcccgtaaaggactttcagatacagcccttcgtacagccgattcaggataccttacaagaagacttgttgatgtttctcaggatcttattatcagagagacagattgtagcgcaggtaagcagatacctggtatgtatgtttactcatttgttaataacagagctactaactcaagtgatgccaaggaagatatccttgagccattacaggagcgtatcacaggaagatacttagctgaggatattgttgacccggctacaggtgaggttattgttgaagctaaccatcttgtaactcctaagagagcagaagctattattaagactggtgttgataaggttaagattagaacaatccttacttgccgttcacacattggtgtatgcgctaaatgttatggaactaacatggcaactggtcagactgttcaggttggtgaagctgttggtattatcgcagcccagtcaatcggtgagcctggtacacagcttactatgagaactttccatacaggtggtgttgccggtgataacattactcagggtcttcctagagtagaagagcttttcgaggcaagaaagcctaagatgcttgctgtacttgctgagtttggcggaactgtaagtattgttaagactgagaagaagactgaaatcgttataactgatgatgaaggtaattcaaaggcttatccattatctaaggatacaagagaaaaggttgttgaaggacaggttgttgctaagggtgaagaaatcacagagggttctgagaatccacatgatatcgtaagaattcttggtgtaagagctgttcaggattatctccttcgtgaagttcagaaggtttaccgtatccagggtgttgatatcaatgataagcatattgagcttatcgttcgtcagatgcttaagaagatagttgttgatgaagctggagattctaagttccttccaggatcacaggttgatacaattgagttccaggaagttaatgagagacttgaggaagaaggaaagacacctgctacaggtactccgattatccttggtattactaaggcttcacttgcttctacttcattcatgtcagctgcctcattccaggagacaactaaggttcttacagatgcagctattaacggaaagattgatccacttattggtcttaaagagaatgttattattggtaagcttatccctgccggtacaggtatgaagcgttatcaggatatcaagatcagttctacagataactacattgaagaagatgaagatgagtctggtgaagatgagcttgttttcacacaggaagattaattctttatagaaacttatggcgtgtcagattgataaaatctggcacgcttttgtctttttttgaaaaaatgcttgacactgaatttgcaaatatatatactaataaagcgtgcgaataggcaagtactatttttgcgctgttttggtgacaaaacattttcttagttgatactaagatgcaaccattcattattctaatttcgggaggtgaaaacggaatgccaacatttaaccagttagtaaaacagggaagaaagactgcagtaaagaagtctacagcaccagctcttcagaagggttacaactcacttcagaagaaggcaacagatatctcttctccacagaagagaggtgtttgtacagctgttaagactgctacacctaagaagcctaactcagctcttagaaagatcgccagagtacgtctttctaatggtatcgaggtaacatcttacatcccaggtgagggacacaatcttcaggaacacagcgttgttcttataagaggtggaagagtaaaggatttaccaggtacaagataccacatcatcagaggaacacttgatacagcaggtgttgcaaagagaagacaggctcgttctaagtacggtgctaagagacctaaggacgctaagtaattaagcctgaattaagacacgcatttatatgaatgcatgcaagttttacaatttgcaagagtcagatttgtaagaatctgatttttacgaacaaattaaattttgaattgtgccggaattagattaatcaagaggttgcaggttaatatatacggcgcgaacacattttttatttgtgagtacctatgatttaataaatttattaaggagggaagaaccgtgccacgtaaaggacatacacagaaaagagatgtattagcagatcctatttacaacaataaggtagttactaagcttatcaacaacattatgcttgatggtaagagaggagtagctcagaagattgtttacggtgcttttgatagagttgcagctaagactgagagaccagctatcgaagtatttgaagaagctatgaacaatattatgccagttcttgaagttaaggctagacgtatcggtggagctacttatcaggtacctatcgaagttaagccagacagaagacaggctttagctcttcgttggatgactacattctctagagcaagaggcgagaagactatggaagaaagactcgctaacgaaattcttgatgcagctaacaacacaggtgcatcagtaaagagaaaagaagatatgcacaagatggcagaagcaaacaaggcttttgctcattacagattctaattataattataggaggttttatccatggctggaagagaatatccattggagagaaccagaaatatcggaattatggctcatattgatgctggtaagacaacattaacagagcgtatcctttattatactggtgttaatcacaagattggtgatactcatgaaggtactgctactatggactggatggcccaggagcaggagagaggtatcacaatcacttcagctgctacaacatgtcactggacacctgagaaagagggtaagccagataagacacagccagaataccgtattaacattatcgatactccaggacacgttgacttcacagtagaggttgagcgttcacttagagtacttgatggtgccgtaggtgtattcgatgcacagaacggtgttgagccacagtcagagaatgtatggcgtcaggctgataagtacaatgtacctcgtatggctttcatgaacaagatggataagatgggtgctgatttcttcggatcatgcaaccagcttattacaaagcttggaaagaatcctgtacttgtacagattcctatcggtaaggaagatgacttcaagggaattatcgacttattcgagatgaaggcatatgtcttcaatggtgataagggtgatgatatcgttgttggcgatattcctgctgatttagctgatcaggctcaggaataccatgacaagcttgttgagcagtgtgctgaacttgatgaagaccttatggagaagttctttaacgatgaggaaatttcagttccagagttaaaggctgctttaagaaagggtactattgaaggtacagctattccttgtctttgcggtacagcttataagaacaagggcgttcagaagcttcttgatgctgttatcgagtacatgccagctcctacagatatcccagatatcacaggtgttgacgaagacggtaacgaagtaacaagaaagtcatctgatgaagagccatttgcagctcttgcattcaagattatgactgatccattcgttggtaagttagcattcttcagagtttactcaggtacattaaacggtggttcatatgtacttaactctaataagaataagaaagaaagagttggccgtatccttcagatgcacgctaaccagagaaaagaaattgataaggtttactcaggagatatcgctgctgcagtaggtcttaaggttacagtaacaggtgatactatctgtgatgaagcacatccagttatcttagagtctatggaattcccagagccagttatcgagcttgctatcgagccaaagactaagaatgaccagggtaagatgggtgaagctttagcaaagcttgctgaagaagatcctacattccgtgctcatacagatcaggaaacaggtcagacaatcatcgctggtatgggtgagcttcaccttgatatcatcgttgacagacttcttcgtgagttcaaggtagaggctaacgttggtgcacctcaggttgcttacagagagtgctttactaaggcagttgatgttgatagtaagtatgctaagcagtcaggtggacgtggtcagtatggtcactgtaaagtacgtttctcaccacttgaagctaacgttgataagtttgatgttgagacaaagaacacagtattaattaacgaacctccagtactcttctgtgagtcttcagtagttggtggtgctattcctaaggaatatatcccttcagttgctgacggtatcagagaagctgctaattcaggtatcttagctggattcccagttcttggacttagagcagatatttacgatggttcataccatgaagtcgattcttcagaaatggcattccacattgctggttctatggcattcaaggatgctatggctaaggcagcacctgcccttcttgagcctatcatgaaggttgaggttactatgccagaagaatacatgggtgatgtaatcggtgatatcaactcacgtagaggacgtattgagggtatggaagatatctcaggtggtaagatgattaaagcattcgttccacttgctgagatgttcggatatgctactgaccttcgttctaagacacagggtcgtggtaactactctatgttcttcgataagtatgagcaggctccaaagtctgttcaggataaggttatttctgatagaaataagtaataactataaaaatatagttgaaatatttcactaaatgaaatataataaatatcagctatgacaaagcccgagggggatacccctcagggcaatctaaatatttttaggaggattttaaacaatggcaaaggctaaatttgagagaacaaaaccacattgtaacattggtacaatcggacacgtagatcacggtaagactacattaacagctgctatcacaaagactcttcatgagagacttggtacaggtgaggctgttgcattcgagaatattgataaggcaccagaggaaagagaaagaggtatcactatctctacagctcacgttgagtatgagacagagaagagacactatgcacacgttgactgtccaggacatgctgattatgtaaagaacatgatcacaggtgctgctcagatggatgcaggtatccttgttgttgctgctactgatggtgttatggctcagacaagagagcatatccttcttgctcgtcaggttggtgttccttacatcgttgtattcatgaacaagtgtgatatggttgatgatccagaacttcttgaattagtagatatggaaatcagagaacttcttaacgagtacggattcccaggagatgatactccaatcatccagggttcagctcttaaggctcttgaagatcctaacagcgaatggggagataagatccttgagcttatgcatactattgatgagtatgttccagatccagaaagagatacagataagccattccttatgcctgtagaggacgtattctctatcacaggacgtggtactgttgctactggtagagtagagagaggtgttctccacgttaatgaggaagttgaaatcgttggtatccacgaagatatccgtaaggtagttgtaactggtatcgagatgttcagaaagcttcttgatgaggctcagccaggtgataacattggtgcacttcttagaggtgttcagagagacgagatccagagaggacaggttctctgcaagccaggttcaatcacaccacaccacaagtttacagctcaggtttacgtattaacaaaggacgaaggtggacgtcatactccattcttcaacaactacagaccacagttctacttcagaacaactgatgtaactggtgtttgtgagcttccagctggtacagaaatgtgcatgcctggtgataacgtagagatgacagttgaacttatccataacgtagctatggagcagggtcttcgtttcgctatccgtgagggtggtagaacagttggttctggtgctgttgcaacaatcatcgagtaattgttattaatacagttctttcaagggtttccgaggttatcggaaacccttttttgcgcgagcagctccttgagaagtcatgggcagttcgcagtcgtgctcgcgaagtaatgagctagaatatgataaaaagaggagtacaacatgctatacataatgcgtcatggcaggacggactggaatgtacgtcataaattgcagggcagaactgatatacctcttaatgatgagggaagaatgatggcggcagaggctggggaaaagtatgcagatatacattttgatgagtgttattcatcacctttggcaagagcaaaagagacagccgagatttttctcaaaggaagaggagtacctgtatatacagatgacagacttgttgagatgggatttggaatgtatgagggaatagagaattcatttgcaataaaggattgcccaattaattctctttttaaaaatccagaggattatgtgacggttgaaggcggggaaagttttgaacagctttttgcaagaacaggggagtttatagacaatgtagttatgccacaggtaaatagtggcaaagatatactgattgttggtcatggtgccatgaactgcagtattatagcaaaattcagaggaacaccactggataaattctgggatggaatgactgataattgtcaggtggtaaagcttatataatattataaaacacaatttttacgatttattcagaccaaatcatgctaggtttcgtatataagtatagaagttaataaatgagactttgacttacaacggaaggttaggatggtgattgggatgagtaggagagatagcaggagaaaatacaaaagaataggaaaaaggaagaatcaaatattccttgtaatggtgactatactggcatgtacggtagcaattgtattaacagtcaagatgaataatcagaatgtcagcaaaggtgtagcagtaggtgcagaatatacagcaattaagagcgatggtaatgtgacggaggaacagctttctgtaagtgaagagactgtaaatgatttaccagatgtatacagaatagaatgctatgaatcgcttaaccagaatccagagctgccaacaggatgcgagattacatcgttaacatccgtactaaattattacggctgcaatgttgataaaacaactatggcggataaatatcttaagaaaggcaatggcagcttctacgaaatgtttcttggtaatccaagggataacacaagttatggatgcatgtcacagccaattgttaatgcagctaataaatatttcaaagttaataatatgtcagcagttgcaaagaatataagcggaacagattttaaagagattcttggtatggttgctcagggtgacccgatagtaatatggaatacaatagatatgagacagccatatgaatctaagacatttgtatttaatgggaaagaatacacatggatgtctccagaacattgtgttgtaattacaggatatgatcttaataagaatattgtttatataatggatcctatggaaggtaatgtaacaaggaatcttgagacatttcaatcaagatatgaagcgatgcacagccaggctgtctatattatagaataattaagggagggcaatattgtcctccctttagtcatgttattagtttgatttaatattgtgccttgcattaagctttttggcacaatgtatgaatgcagggaacaaaaatgcgtcagcagcaatccatgcgattggtgaggcgaggcatgcccccatgaatccaatacttggaatgagtatgatggctgcaaatgcacggccaatcatctctaagatacctgctgatattgcaaatactgagaaacccataccttgtatgcagaagcggactacgttaacacctgtaagcggaatgtagaagcatgcagatgcaagaatgaactgtcttgtaagagcaataattgttgtctcagatgcattaacgaataataatgcaatataatctgtagtgaaatacagtgcaataagagaaagaacactgtaaactgaaccgattatcatagcggagcgtacgccctgaccaagtcttttaatcttggcagctccaacattctgtccggcataggttgccatggttgagccgagtgcatcaaatggacaacaggtaaagttgaacatcttagaaccggcagtcattgcggctacatatgttgaaccaagtgtattgacagcagcctgaaggattgtacttccgatggctgttattgaatactggagtcccataggaacaccgttcatacacaggttggtgatgaatcttctatcaagtaccctttctgatttgtcaccttttaagatgtcatatttcttatacatatatataaggcaggtaagtcccgaaattaactgtgatgttacagttgcccagccagctccggcaacacccatcttacatacaagaataagaaagaaatcaagtactacatttattattgaagaaagcacaaggaaaactacaggtgttttactatcgccaagcgaacggataacaccggacaccatgttgtacaggaatacagttgggattcctatgaatataactactatgtaattataggcatggtcaataatatctgccggtgtattcatgataataagtatcctgcggcagaatattacggatgcaagcgtaagcaatatggcaaacacaatactgcagatatatccgttaaatacatattttctaaggtcagcaggcttctttgcaccaaagcattgggcaaccggaatcacgaatccgttacagactcccatacagaaaccgattatcatgaagttgatagaacctgttgctccaactccggcaagagcttcaacaccgagagttttaccaacgattattgtgtcaacaaggttgtagaactgctgaaacagcattccgaacagcattggaactgcgaatccaagaatatgcctggaaggcgaaccatttgtcatgtcttttaccataggatttcctcactttcgtatatttataaagccaaatgattatactatatttttgcaaactgtcaaactgattttgcacgaatttgaattaatttaacgaattattgtcttaatatgaaatgtctgttaaaatgcataggtaatatttatgcggaggcagatatgaagaaaacttttgatgttaagagacttacaacactggcattgcttacaacaatagcgctgacaatatttgttgtggaatcagcaatacctacgcttgttccaataccgggagttaaattaggacttgccaatatagtcacactttttgtgttaaaaagatataaattcagtgatgcagcgattgtgttagctatgagaattatacttgctacaatatttacagggcaggcagtatcatttatatatagtgtaagtggtggattcttatgtcttattgtgatggcagctgttaataaattgcttaggggacagtatatattccttacaggtatacttggcgcggtgtcgcacaatgcaggtcagattcttgctgcatttttcatactcagattgtcaggtatatttgcgtacatgccgttccttgtgataagcggtgttataacaggtctgtttacgggccttgtgtgcttctttgcagacaaatatattcctaaaaaatatactatgtagcagatggaggagattgtgaaaaaaagagttattgcagtggtggctgtgattgtcctgcttgtcggggcaagtgtggcttctattatatatatgaaatcaggaaagaatgacggtagaaagactgcttatatatacagagataacgaattgttaagaactgtttcgttagatgatgttaagaatccgtacacgttcaggattgaatacggggatggagagtataatgatattcttgtcgagaatggaaagattaggattgctgatgcaagctgtccggataagctgtgtgtgaacatgggctatatatctgagcctttaatgccaatcacatgtctgccaaatcatcttgttatcagaattgtgaatgacggcgaagaatcgccgtcactcgatggtgttgtgtattaatcatttcatccagcggccagaagcaccacatggaagaacaagtccgttgcttgaaacaggaagacctacttcctgtgaatcacagtgtccgccaaagctcttaagttctgtgcttaacatataagtaagaacggctggctgaagacctgtagtgtatgaattaataaggaaaaataatggttcatcagaaagaagctgtgcacaaagcttaacaagcgggtgtatggcttcttctattttccagatttctcctttaggaccacgcccatatgaaggtggatccatgatgattgcgtcgtaatggttgcctcttcttatctctctttctacaaactttacacagtcatcaactatccagcggataggcttgtcaataagtcctgaagactgtgcattttctttagcccatgcgactatacccttagaagcatctacatgcgtaacattagcacctgcggctgcacatgcaagtgttgctccaccagtataagcaaacaggttaagaacctttacaggttcgctgccacgctttttcctggcatcagagattatctttccaaaccagtcccagttagcagcttgctcagggaatattcctgtgtgcttgaagctgaatggctttaagttgaatgtcagctcctgttcaaatgaaggactgttgtagtgaatctgccactgctgtggaaggtcaaagaactcccattctccgccgcccttagaacttctgtggtaatgaccgttcatattcttccagccacgctctttcttaggagtgtcccatattacctgtgggtctgggcgtacaagaatatacttaccccagcgttcaagtttttcaccattagaggtatctattacttcataatctttccagttgtcagctataaacataattaagtatccttttctatattaaaatatgttgcggtttggtaccgcatttgttattaaataattatatacgaaaatattaataactgcaatcgtgcaaaaatgttttgaacaggcttgttttatgttaatatatttctatcgaaatctgattaaggggcgatgcatattgaaaaatgttagtttaaagaatatacagaaggatattgtatcaggaataattgttgctcttgtgtcaattcctatatcaatgggatattcacagattgcgggactgccagcggtgtatggtctgtactgctctattctgccagttcttatatatggatttgttacatcttcgccgcagttcgtgttcggagtggacgcaactccggcggcacttgttggtggaacacttgcaacgcttggaatagtgtcaggctctgaggaggcaaaggcagtagttccggcgataactttggttgcagcattgtggctgctgcttttcttctttatcaaagcagggcgtattgtcaattatatatctacacctgtgatgggtggatttataagcggtattggcgttacaataattcttatgcaggcagcaaagctttttggcggtaatgctgggactggcgaagcgatacagcttgttatgcatatagctggcgagtttgattcatttaatctgctctcggcagtgcttggagtcggaacagttgtgattattcttgttgcgaagaagttcattccaaaatttccaatgtcagtgcttcttatggtacttggtgcacttgcaactgcaatttttcatattgacagattcggtgttaagcttcttccgcatgttgataaggggctgccgggattctcatttcctgatatgtcagttgtgtttaagaatccgtcagatataatacttcttggactttcagtggcaggtgttgtcatggcgcagacattgcttgcaactaataattatgccaacaaatatggctataaggtaagcaacaacagagaaattctggcatatgctgctgcaaatgcggcttctgctgtaattggcggatgccctttgaatggaagtgtgtcaagaacaggaattgcagaccagtttggctgcaaatcacagttcatgtcaataacagcttctctgacaatgcttcttatagtgctttttggtacgccggtgcttgagtatcttcctgtaccaatacttacaggaattgttgttgcggcactgattggaattactgaattcgggcttgcagttaaattatggaaaacagaccatacggagtttgcaatatttgtaggtgctttcttaggtgttctgttatttggaacgatatacggagttgtaatcggtgtaatactttcattcattgcagttattgtaaaagcggttgaaccaccgagagcatttctcggggtgataccgggacaggagggattctatagtcttaacagatacagcaatgtaaagaagataaaaggcgtggttatatacagatttaacggagcacttttctttgcaaatattaatacatttattgatgatatagaaaagaatcttgatgataatactaaatgggtaattgtagacgccggaggcgttggatctattgatgtgacggcagttgacaggcttatggctttatataaggtgcttgaaaagaaaggtatcagattctatattacagagcatgaacacacattaaatgaccagttaagagagcttggtgcaggagagtttgttgaaaaaggtgttgtaagaagaactattccgcttgccctaagagatgcaggtcttgacagaccttatcctgtcgaggaggaagaagagcaggctgtttctggcgaggtacatgaggacaacgaaagacttgcagaaattgagtgggcttttggtgaagatgcagatgaatggcttgagaagatggcagcagagatggctgatgagattggcagcgtcaagaaagatgagaagaatgttattgttgatgctgaaaagcatgctgcatggggaagaatcggactctttgatgagaatgaactgcttgagcgacttgagatgcatttgtttgatgataagaaatatcctaatcttgatattgatgatattgagaaaagaattgatgaacgccgcgttgttgttgagaagaagctggcacagattaatcctgatgcaatacagatgcttaaggaacacagaaaacagatacttgacagaatgaagcttcacaatccgtatgcatatgagcatatgatggagcagaagaagaagcattatgaacatctgaagaagaaagacccggagcttgcacagaagcttaagaatttctataatctttcagatgacgataaataatttatataacggagataattgtgaatatattaaatgttgaaaaggtcagcaagacctatggagaaaaggaactttttaataatataagtctgggaattaacagtggagacaagattggacttataggtgtgaacggaacaggaaagtctacacttttaaagattattgcgggcattgaagagccggatgaaggacaggttgtaaagggtaaggggattgagcttgcatatcttgcacagacgcctctgtattatgataatgaaaatgtactggaatatgttatgcgtggaaagcatgcagacagccagccgaaagcaaaagagattcttaacaagcttggaataacaaatcacgctgcaatgatgaatattttatcaggcggtcagaaaaagagagcagcacttgcaagaactttagttgagccggcaaggcttcttattcttgatgaacctacgaaccatcttgacaatgacatggtgctatggctggagcagtttattaagagttttaagggggaacttatcatggttactcatgacaggtatttccttgataatgtaactaacaggattgttgagcttgataaagcttccctgtacagctatgatacgaattattcaggctttcttgagctgaagacccagcgcgaggagatggagagggcgactgaggccaagagacagaatatattaaggaaggaacttgcatggatcaggagaggttgtcaggctcgttctaccaagcagcaggcccggattgacagatttgaggatatgaaggaagcttcaaagcaggcgagagccagatttgacaagcagcttatggatatgaattcggtcagcagcagacttggaagaaagactgttgaacttcacaacatttgtaaaagctttggagagaggacaataatagatgattttacctacatttttctaagagatgacagaatcggtattgtcggtgataacggatgtggtaagtctacgcttatgaagattatagcaggccagcttgaaccggacagcggtagtgttgaggttggagagactgtaagaattggatatttcatgcaggagaatgaaccacttgacgacagtcttactgtgcttgagttcgtaagaagcataggcgaatatgttacgacggcagatggaaaggcaacagcgtcacagatgtgtgagaagtttttgtttacaccgaagcagcagtggacaccgataagcaagctgtcaggtggtgagaagaggagactttatctgttgagtgttcttatgagtgcgccaaatgtgcttattctcgatgagcctaccaacgaccttgatattgaaactcttgagattcttgaggagtatcttgatggatttgcaggtattgtaatcacggtttcacacgacagatatttccttgacagagttgttgacaggatatttgcgtttgaggcaggaggccaccttacacagtatgaaggcggttatacggactacagggataaatgtgtttcttctatatataatgtggtatcaaatggaacatctgatacatccaaatcaaaggcagcaggcccggtgaagaaagcttataacagccatgaggataagattaagtttacatatatggaacagaaggaatatgagactatagatgatgatatagagaagcttgaaactaaagtttcagaacttgatgatgagattgcaaagaacgcaacttcttattctaagcttgcagaacttactaaggaaaaggaagatgtggagaggcagcttgaagaaaagatggagcgatgggaatatcttaatgatcttgcagaaaaaatagagaaacagaaacagtagtaaatattaacaaaacaagtgacatcagaacagattatttggttgagcaaatcatatattcatggtatgatgatatatgatttactatattaatcatatgagggaggaaaaattatgttttgtccaaattgcggaacaaagaacgaggacgatgcactattctgtggaaactgtggaacacgtctagtgatagatgtgcctcaggagacaccagtgcaggaaagtgtggaagaagagccagaggtaacaccggtacaggagaatgtgccagcagagccggaggaaacaccggtacaggagagtgtggcagcagagccggaagtaacaccagtacagcaaagtgttccagttcagccacagcaggcttttggtcaacagcctgtacagcctacacagtttacaggtcagaattccggtcagcagcctgccaataataagcctgccagattccctaagggtataattgcaattgtagctgcgggagttgctgtgatagctgccataattatatttgtatgtgtgggaaagaatgtgacagattataagaaaactgccaagcagtatgttaaggcggttgcagagtgcgaatggaatgatgcgtatagtcttattaacctgcctgatggagagtttcttacaaaagaagcatttattaatgttcatgcagatgcgactggtgagaaagttgaaaagatggcagcagatgacattgtctcaacatatagcaagatgcctggtaataaggctgttaaggtcggatatataacagattcgggaatgcagtataatgatgtgtatcttacagtagccaataagcactatatgcttttctttaagaagtataaagtcagcgctgagaatcttgtagtaaaggatgttacaataaaggttccaaagggacttacattatatattaatgatgttattgtcggtgatggatataagtcggatgcatctaagaatggaaacggttcttctgatgaatatgttataccatatctgttcaatggaaagaataatattaaggtaactggagaatttatagaggactacacaacacagctttatgcagcacatgatgaagatacatttactgttggaacatacaatgcaaaatatgttaattcgaagcttgaagaacttaagacacaggcaagaacagatgtggatgcaataattaacgctgtacaggcaaagaaagattattcagctatagccgacagggtgtgtaaagaagaaaagaagaacatagagtcagcttataagaatatttacgacagctacaatgacaaatacaaaactgtatccgatttgaagatttccaaattcacagcttctatcgcggatacatctttcagagtggattcagatgatggatgcccggtgattaaagtttcaattaaactaggatatacatacaagatacagtactcaggaagtgataaagctaacgacaagaataataacaataattcagcttacatatattataaatatgaagatggtaagtggaagattaattctatgtatcttggatttggattttattaaaatactgttttgaccgggacttatgttccggtcaaatttgttttgcattgtactgaaaaaaatacaattttttctgttgattttatatagagagtagtgtatattaatacttgctgtgacattgatagctgtgaagcgtgaggttgctgctttaataaagcaggttttccgtggagcgaatgtcaatgctggagataatctccggcgaagaaactggcgacaagtcactgtaccaaaatcatctgcaatccgcagaaatgacgcgcgtgggtcgaattatgaatgagactatatgatacgcgtgggagtgtgtacagtcaccgcttgtcgtacttaaacaataaagtgcgaaggaggcgactttttttatggcaaatcaggtaatcagaattactctgaaggcttacgatcatcagttgattgatcagtcagctaagaaaatcatcgaaactgctaagaagacaggagcacaggtgagtggtccggtacctcttccaacaaagaaggaagttgttactattcttagagctgttcacaagtacaaggattcaagagagcagttcgagcagagaactcataagagacttatcgatgtattatcaccatctcagaagactgtagatgcattatctaagttagagatgccagctggtgtattcatcaaccttaaggtaatgaactaatcattatctggaatttttcattattaaagcaataatcctaagggtttaatatagaagtaacaagcagtggtgcgggttccacttatattagctgttctaggatgacaggatgcgctgtgtatcacacatcatcttgtccgctgtagattaaacaggaggaaaatcaatgaagaaggcaattttagctacaaaagtcggaatgactcaaatcttcaacgaagacggtgttttaacacctgtaactgttcttcaggctggtccttgtgttgttacacaagttaagacagtagaaaacgacggttacgatgcagttcaggttggttttgctgacattagagaaaagttagtaaacaagcctgttaaaggacattttgataaggcagaggttccttacaagagattcttaagagagttcaagtttgagaatgcttcagagtactctgtaaaggacgaaatcaaggctgatatcttcgctgcaggcgataaggttgatgcaactgctatttcaaagggtaaaggtttccagggcgcaatcaagagattaggccagtcaagaggacctatggctcatggttctaagttccacagacatcagggttcaaacggatcagcaacaacacctggtagagtattcaagggaaaaggaatgcctggacatatgggttctaagagaatcacaatccagaatcttgaagtagtaagagttgatgttgaaaacaacgtaatcttagttaagggtgcagtacctggacctaagaaatcattagtaacactgaaagaaacagtaaaagctgctaagtagtttttgctaaggaaggaggaccacacagatggcaaacgtatctgtttacaatattgaaggcaaagaagttggttcaatcgaattaaatgatgctgtatttggtgtagaagttaacgaacatctcgtacacatggcagtagttaaccagcttgcaaataatcgtcagggaacacagagcgcaaagacacgttcagaagtttctggtggcggaagaaaaccttggagacagaaaggaactggtcatgcaagacagggttctacaagatctccacagtggacaggcggtggtgttgtatttgcaccaaagccaagagattattcattcaagatgaataagaaggaaaagagaattgctcttctttctgcattatcatcaaaggttgctgacaacaagatcgtagttcttgatgcatttaaccttgatgaagttaagacaaagaagttcgcagaagttatgagcaacttaaaggttgataaggctttagtagttattgaaggtgagaacaagaatgtagttctttcaggaagaaacattcctacagttaaggtttcagctactaacgaaatcaacacatacgatgtattaaagtatgaaacattagtagttactaaggctgctgttgaaaaattagaggaggtgtatgcataatggcaaacgtacagtattatgatgtaatcctcaagcctgtaatcacagagaagtctatggctgatatggcagataagaagtatacattcttagttcatacagatgctaacaagacaatgattaaggatgctgttgagaagatgttcgaaggaactaaggttgcttcagttaacacaatgaatcttgatggcaagaagaagagaagaggcagaacagctggtacaacttctaagactaagaaggcaattgtacagttaacagctgacagcaaggaaatcgaaatctttgaaggcctttaattagtagctttaaagtgtagaaaacaatattacacagactcgaaaggagagaaataatgggaattaagacatataacccatatacaccttccagaagaaatatgactggatctgatttctcagagattacaaagagtactccagagaagtcattacttgctaagaagagcaagaatgctggtcgtaacaaccagggtaagattactgtaagacaccacggtggtggaaacagacagaagtatagaatgattgatttcaagagaaacaaggaaggcgttccagcacaggttatcggaattgagtacgatccaaacagaacagctaacatcgctcttatctgctacgcagatggtgagaaagcatatatccttgctcctcagggattaacagatggcatgacagtacagaatggtgctggtgcagaagtcagagtaggtaactgcttaccactttcagagattccagttggtactcaggtacacaacattgaattatatccaggtaagggtggacagcttgttcgttctgctggaaactcagctcagcttatggctaaggaaggcaagtatgcaacacttagattaccatcaggcgagatgagaatggttccaattatctgccgcgcaacaatcggtgttgtaggtaatggagatcacaaccttattaatcttggtaaggctggacgtaagagacatatgggtatcagacctacagttcgtggttctgttatgaaccctaatgaccatccacatggtggtggtgaaggtagagcaccagttggtcgtccaagcccaatgacaccttggggcaagccagctatgggtcttaagactcgtaaggctaagaaggcttcaaacaagcttatcgtaagaagaagaaacggaaaggctattaagtaattagcctgcaatcgtaactattattattcacgaagattataaggaggtttcaacctatggctcgatcacttaaaaagggagcatttgcagacgaaagcttacttaagaaagttgatgctttaaatgctgcaaacgacaaacaggttattaagacttggtctcgtcgttcaacaatttatcctcagtttgtaggtcatacaatcgctgttcatgatggtagaaagcatgtgcctgtatatgttacagaggatatggttggtcataagctcggtgagttcgttgcaacaagaacttacagaggacacggcaaagacgaaaagaagagtagataatttgaatttttgaaaggaggtttaatccatggctaacggacatagatcccagattaaacgtgaaagaaacgctgttaaggatacaagaccaagcgcaaagttatcttacgctagagtatctgttcagaaggcttgtttcgtattagatgctatcagaggcaagagccttgatgaagcacttgcaattgttatgtacaatccaagatatgcatcatctattatagagaagttattaaagtcagcagcagctaatgctgagaacaataacggtatggacccaagtaagttatatgtagaagagtgctacgctaacaagggaccaacaatgaagagagtacatccaagagcacagggtagagcttacagaatcgaaaagagaatgagccacatcactgttgttttaaatgaaagataattattttctaagagatagaaaggagtctttatgggacagaaagttaatcctcatggtttaagagtcggcgtaatcaaagactgggatgcaaagtggtatgcagaagacgatttcgctgataaccttgtagaagattataacattagaaaattcctcaagaataagttatatgctgcaggaatttcaaagattgaaacagagagagcttcagacagattaaagatcgttattcatacagctaagcctggtatcgtaatcggtaagggtggtgctgaaatcgagaacttaaagaagcaggtagagaagttaacatctgctaagaagttaagcattgatatcaaggaagttaagagacctgataaggatgctcagcttgttgcagagaacatcgctcagcagttagagaaccgtatctctttcagaagagctatgaagtcttgcatgggcagaacaatgaagcagggagctaagggtatcaagacatcttgctcaggacgtctcggtggagctgatatggctcgtacagagttctatagcgagggtacaattcctcttcagacacttcgtgcagatatcgactatggatttgcagaagcagatacaacttatggcaaggttggtgttaaggtttggatctacgaaggtgaggttcttcctacaaagaataatgccaacgctaacgtagaaaaggaagggagcgataagtaatgttactacctaagagagttaaacatcgtagacagttccgtggttctatggctggtaaggctacaagaggcaataagatcactaatggtgaattcggtattgttgcaacagaaccttgttggatcaaatcaaatcagatagaagctgcccgtgtcgctatgacaagatatattaagcgtggtggtaaagtatttataaagattttcccagataagccggtaacaggtaagcctatcggtgttcgtatgggtaaaggtaaaggtaacttggagtgctgggtagcagtagttaaacctggacgtgtaatgttcgagatttcaggcgttgctgaagaaacagcaagagaagctttacgtctcgcaacacataagcttccttgcaagtgcaagattgtttcacgtgcagacttagaaggcggtgataacagtgaaaattaataagtatgtagaagatttaaaggcaaaatcagctgcagagttaaatgaagaattagtagctgctaagaaggaacttttcaatttaagattccagaacgcaacaaatcagctggacaacacaagcagaattaaggaagttcgtaagaacatcgctagaatccagactgtaattgcacagaagaatgcttaattaaggcatgtagacttagatatcctaagaaaggagaataactgtggaagagagaaatttaagaaaaactcgtacaggtaaggttataagcaataagatggataagacaatcgttgttgcagtacaggacaacgttaagcatccactttacaataagatcgttaaaagaacttacaagttaaaggcacacgatgagaacaatgaatgtttaatcggagatgttgttaaggtaatggagactagacctttatctaaggataagagatggagattagttgagattatcagtagagcaaaataataagaatttatttgtgatattactgaaaggagtagtattatggtacaacaggaaaccagacttaaggttgctgataatactggtgctaaggaaattctttgtatcagagttatgggcggatctacaagaagatatgcaaatatcggtgatgtaattgtcgctactgttaaagaagcaacaccaggcggcgttgttaaaaagggtgacgttgttaaggccgttgtcgtacgttcagtaaagggcgcacgtcgtaaggacggttcatatattaaatttgatgagaatgctgctgttataattaaagatgatcagactcctaagggaactcgtatctttggtccagtagccagagagttaagagataagaagttcatgaaaatcgtatctcttgctccagaagtattataggaggtaccacaatgtcagctgttagaattaaaaagggtgatactgttaaggttatcgcaggaaaagacaaaggcaaagagggcaaggtattgtctgtaaatgctaagaatcatacagcattagttgagggtgttaacatggttacaaagcatgctaagccaagcgcagctaatcagcagggtggaattctccaccaggaagcgccaatcgatatctcaaatatcgcttactcattaaagggtaaggaaacaaagattggttatgacttcaaggacggtaagaaagttcgtgttgctaaggcaactggcgaagttatcgattaataaaggaaggaggcaataattttgagtagacttagagaattatacgataatgaaattactaagaagatgactgagaaattcggttacaagaacccaatgatggttccaaagatcgacaagatcgtaattaacatgggcgttggcgaagctaaggaaaattcaaagcttcttgacatagctgttaaagaaatggaaacaattgctggtcagaaggcagttcttacaagagctaagaattcaattgctaacttcaagttaagagagggtcaggcaattggttgtaaggttacattaagaggagagaagatgtatgaattccttgacagattagtaaaccttgcattaccacgtgtacgtgacttccgtggcgttagcgctgattcattcgatggaagaggtaactatgctttaggtatcaaagagcagattatcttcccagaaatcgaatatgacaagattgataaggttagaggtatggatgtaatcattacaactacagctaagactgatgaggaagctcgtgagttattaagattattcaacatgccatttaagaaataattaaggagggaaattcaatggctaagacttctatgaaggttaagcagcagagagcacctaagttctctacaagagcgtatacacgttgtacaatatgtggtcgtccacattctgttttaagaaaatacggaatctgcagaatttgcttccgtgaattagcttacaagggacagattcctggagttaagaaagcatcttggtaaaatcaattaacgtagtcctggtaacaggaaaccagttaaaataaggaggaaaatttcaatgacagatccaattgcagatatgcttacaagaattcgtaatgcaaatacagcaaagcacgacacagttgatgttccatcatctaagatgaagcttgcaatcgctaagattcttttagacgagggttatattaagtcttatgagctcgttgagaacggtaagttcaacgatatccgtattacattaaagtacggtgcttctaagaatgagaagatcatttcaggtcttcagagaatctctaagccaggtcttagagtatatgcaaacaaggaagaacttccaaaggttctcggtggtcttggtgtagctattatatctacaaacaagggcgttatcactgacaaggaagctagaaagctcggcgttggtggagaagttctttgcttcgtttggtaattattgaacacttacacacagggaaacgggaatcctatcccatcgtagttcagcgtatatgaatgtttccctcattataattaggaggtgcacggcatgtcacgtataggaagaatgcctatcgctatcccagcaggagttactgttgagattgcagaaaataataaagtgactgtaaagggtccaaagggaactcttgagagagttttaccagcagagatggacattaagcaggaaggttctgaaatcgttgtttcaagaccaaatgacttaaagaagatgaagtcattacatggacttacaagaacacttattcataacatgattattggtgttacagaaggctatgagaagaagcttgaagttaacggtgttggttatagagcacagaagcagggtaagaagttagttctttcattaggctactctcatccagttgagatggaagatccagaaggaattgaaacagttcttgatggaacaaacatcatcattgttaaaggtatcagtaaagaagcagttggccagtacgcagctgaaatcagagcaaagagagctccagagccatataagggcaagggtatcaagtatgctgatgaagttatcagacgtaaagttggtaagactggtaagaaataattaaaggagaaaacataatggttagtaagaaatcaagaacagtagttcgcgaacagaagcatagaagattacgtaatcgtttcagtggtactgcagaaagaccacgtttagctgtgttcagaagcaataatcatatgtatgctcagattattgacgacacagttggaaagacacttgtatcagcatcaactcttgataaggaagttaaggcagagcttgagaagacaaataatgttgaagcagcagctgctgttggtacagtcgtagcaaagagagcattagaaaagggaatcaagactgttgtttatgacagaggcggtttcatttatgcaggtaaaattaaggcattagcagaggcagctcgtgaagctggccttgaattctaagcggaagggagattacagtatgaaacgtacaataattgatgctagtcagttagaattaaatgataatgtagtatcaatcaagcgtgtaacaaaggttgtaaagggcggacgtaacatgcgttttgcagcattagtagttgttggtgacggcaacggacacgtaggtgcaggtgttggtaaggcagctgaaattccagaagctatccgcaagggaaaagaagatgctatcaaacatttagtagaagttccaatcgatgagaacggttcagttccacatgattttcttggaaagttcggaggagctacagtattattaaagagagctccagaaggtactggtatcatcgctggtggtccagcacgttcaatccttgagcttgcaggtatcaagaatatccgtacaaagtcacttggatcaaacaacaagcagaatgttgtattagcaacaatcgaaggacttaagtctatgaagactccagaagaagttgcaagacttcgtggaaagtcagttagcgagatccttggttaattaaattgtgattcctgctaagcaggagatggaggttaaaatggctgagaagttaagaataactttagttaagtctccaatcggcgctgttcctaagcatagaaaaactgttgaagctatgggtcttacaaagatgcataagacagttgaacttccagataatgctgctacaagaggacagattcagcagattggttatatgttaaaggtagaagaaatctaattacagataaggaggtgcaatgatggatttatctaatttgagacctgcagaaggttcagtattaagcgataatttcagaagaggtcgtggacatggctcaggtaacggcaagacagctggtaagggtcataaaggacagaaagctcgttcaggagcaccaagaccaggttttgaaggtggccagatgccattatatagaagaattcctaagagaggattcactaacagaaaccgtaaggaattcgttgctattaatgttaatgtattagatcgttttgataacggtgcagaggttactgttgatacattaatcgagtcaggaatcgttaaagatcctaaggacggaatcaagattcttgcaaacggcgagcttacaaagaagcttactgttaaggctaacgcattcagtgctgcagctaaggagaagatcgaggctctcggcggaacctgcgaggtgatctaatatgtttaaaacacttgtaggcgcttttaagaacaaagatataagaaaaaagataatatatacattattaattcttgttgttgtcagagttggaagtttacttccaatccctggtgtagacaccaattattttagtagcttacttagtggaattaatactggtgatttaagttatctcagtgcttttacaggaggttcattcgaaagaatgtccctctttgcgctgagcataacaccatatatcacatcttcaatcattatgcagcttctcacaattgcaattcctaaattagaggaaatgcagaaagagggagaagatggtagaaagaagattgcatcgattacaagatacgtaacaattggtctttctttaatagaaagtatcgctatggcggttggatttggtagatcaggtcttatcaaagattcagcacagcttagcacattgcattatgtagtatgtataatcgtagttatagctgcacttacagctggttcagcagtattaatgtggcttggtgagcgaatcactgaaaagggtgttggaaatggtatttcaattgtacttttaattaatatcatatcaggtatgcctagtgattttgctacattatatagcacatttgttgcaccaaagacacctgcaaagggtgttttagcagcagtaataatattagcaattcttattgttatggtagttcttgtatgcttccttcaggatggagagagaagaattcctgttcagtactctcagaaggtcagcggtagaagaacagttggcggacagtcaacaaacattccattaaaggttaatactgcaggtgttatgccaattattttcgcatcatcacttatgcagttcccagttataatcgcccagttatttggtaaatcatatgagtggaccagatatctcagctcatcatactggtgcagagttgaagctccaaagtattcaattggtttattagtatacatagtactgcttataatattcgcatacttctatacatcaataacatttaacccaattgaggtagctgataacttaaagaaggctggtggagttatcccaggaataacacctggtaagtctacaagcgaatatcttaacaaaatacttaattatatcgtatttattggagctgtcggacttttaataattgccctcattccaataatgtgtacaggattctttaatgcttctgtttcattcggtggaacatcaattatcattattgttggtgttgtacttgagacattaaagcagattgagtctcagatgtgcaatcgttactataagggattcctcagtgagtaattctttatatcacggatgatattagtataaaatattgacttgcccggtttatgccgggtaagtcctttgtgtattatgatttattacgaatatttatgattttggaatggagaaaatattatgaagataattatgttaggtgctccaggagcaggtaaaggtactcaggctaagaagatagcagcaaaatatgctataccacatatctctacaggagatattttcagagctaatattaagaacaatacagagcttggacagaaggcaaagacatacatggataagggagagctcgtacctgatgaattagtagtagatcttatcatggacagattcaaggaagcagattgtgctaacggatatgtacttgatggattcccaagaacaattcctcaggcagaggcacttgataaggctcttagtgctaatggagagtcagttgactatgcaatcaatgtcgaagttcctgatgaaaatataataaacagaatgtctggaagaagagcatgtgtaggttgtggagcaacataccatatccagttcaatccaacaaaggttgaaggaatatgtgatgcatgtggcgagaagcttatcttaagagatgacgataagccagagacagtaaagaacagactttcagtatatcatgagcagacacagccattgattgaatactattcaggaaagggtgtacttaaggaagttgatggtacacagcctatggatgatgtatttgctgcaatagttaagatcttaggttaatcatctatgagtgatataaagggatattttgcaagttctaaagcaggccatgacaaaggtactgtgtatatgattctcgaatctgatgatgtatatgtttatctgtcggacggtaaattaagaccgacagataaacttaaaaagaaaaagctgaaacatgttcagctcataaaacaaaaagatagtgatcttgcagaaaagatagagaaaaacctgtttataagtaatgaagaaataaaatatgcgattaagcagattaaaaccagtgccaaataataggaggtaaacttatatgtcaaaggcagatgtaattgaaattgaaggaaaggtagttgagaaattacctaatgcattttttaaagtagaacttgagaatggacatcagatacttgctacaatcagtggtaagttaagaatgaacttcatcagaattcttcctggtgataaggtaacaattgagttatcaccatacgatttaacaaagggaagaatcatttggagagataaataaaaacaataggaatatatgtacaaaatattctttataaattttgtaaaattttccttgcgttgatagaaaaggttgtgctataatagcaaccgaacttgtctgaaaggaggcttttgcagtgaaggttagatcatcagttaaaccaatttgtgaaaaatgcaaagtcattaaaagaaagggcagcatcagaattatctgtgaaaaccctaagcacaagcagagacagggctaattaccctgaagcagagaagtagaagtacttctcatatttctgcgttatagtatcaatgtcactagttggtattataactaattctgtctttaatataatggacagagaacagttttgcggctgcagcgatgacacatccggataagttgacggtgttcattgctatcaaatatagtagactgaaggtgacgcacacatttcaggcgttcaaagcgggggatagagcttagaacgagctgcgtaggaatcggactacatttttctatctttattattaatattaatttaattgatcaaacggaggttaaagaacacatggctcgtatttcaggtgtagacttaccaagagaaaagcgtattgaaataggacttacttatgtttacggtattggccgagtaagagcatctaagattcttgaagaggctggcgttaatccagatacacgtgttaaggatcttacagatgaagaagttgcaaagattgctaaggttatcgatgctgatccagaacatttagtagaaggtgacttaagaagagaagttgccatgaacattaagagattaaaggaaatcggatgctacagaggaatccgtcatagaaagggacttccatgcagaggtcagaagacaaagactaatgcaagaacatgtaagggtcctaagaagactgtagctaataagaagaaataattgaattgttaaactcacaggaggttagttatcatggctcagaaagttacaaaaaaagtgacaaagaagcgtgttaagaagaacgttgaaagaggacaggcacatattcagtcatctttcaataatacaatagttacattaacagatgcagaaggaaatgctttatcatgggcatctgcaggtggactcggattcagaggatctaagaagtctactccttatgcagcacagatggcagctgagacagcaacaaaggctgcattaatccatggattaaagtctgtagacgttatggttaagggaccaggttcaggtagagaagcagctatcagagcactttcagcagctggtcttgaagttacaagtatcaaggatgttactccagttccacataatggatgccgtccaccaaagcgtagaagagtttaatttagggaggtaagattacaatggcagttaatagaacacctgtcctcaagagatgtagatctcttgaaatggatcctgtatatttaggaatagataagaaatctagaagaaaggcaaagaacgctggtagaaaggttagcgagtatggaatgcagcttcgtgagaagcagaaggctaagttcatctacggtgtattagagaagcctttcagaaattactataagaaggctgagagacagaagggtatgactggtgagaaccttatgatcatgctcgaactcagacttgacaatgttcttttcagattaggattcgctagaacaagaaaagaagcaagacagatcgttgatcacaagcatgtattagttaatggtaagtgcgtaaacatcccttcataccttgtaaaggctggagatgttatcgaaatcagagagaagtctaagtcatcagcaagatacaaggaaatccttgagtctactaacggaagacttgttccagagtggttagaggcagatgcagacgctcttaagggatcagttaagtcaatccctacaagagaagttattgacgttcctgtaaacgagatgcttatcgtcgagttatattctaagtaatccgtatcggaaatatagaataaaacttataaaacccataaaaaggagggactatacatggttgatgcagattttaatttcaagatgccaaagattgagatgacagaaaaatcagaagatggcaagtatggaaaatttgttgttgagccactcgaaagaggatatggtttaacattaggtaattctttaagaagaattatgctctcttcattagttggtacagctgtaagcagtatcaagattgaaggtgtacttcatgaattcagctcaattccaggtgttaaggaagatgttactgagatcgtcatgaacatcaagcagttatcaatcaagaacaacggaaattctgttgagcctaaagaagcacatattgacttcgtaggcgaaggtgtagttagagcatcagatattcaggttgatcctgatattgaaataatcaatccggatcttgttattgcacatcttaatggtgcagacagcaagctcacaatggaacttacaatcactaatggtcgtggttatgtaagctctgagaagaataagagagatgatcagccagcaggcgttatcgctattgattcaatttacacaccagtagagagagttaatatggcagttcagaatactcgtgtaggtcaggatacagattttgataagcttacacttgatattttcactaatggaacaatagaaccagatgaggctttaagtctcgcagctaaggttttaagtgaacatttaaagggattcatcaatctttcagagaacgctcagaaagtggaaatcatggttgagcaggaagaggatgagactactaaggtcctttcaatgagcattgaagatcttgaattatctgttcgttcatctaattgtcttagaagagctggtatcaacacagttgaagagctttgcaacaagacatcagatgatatgatgaaggtaagaaacttaggtaagaagtctttagatgaagttctccttaagcttaaggaaatgggcttacatcttagacctaacgaagattaatttgtagatacggcggctatacagtaagtccataagcgcatgtgtagctgttacaaatggaggtaaatcatggcaaaatatagaaagctcggcagaacatctagccagagaaaggctttattaagaagtcaggtaacagcattaatcgagaatggcaagattgttactacagaggcaagagccaaggaagtaaagaagatggctgaaaagctcatcacacttgcagttaaagagaaagacaacttcgagacagttaaggtttcagcaaaggttcctaagaaggatgctgaaggcaagagagttaaggaagttgttgatggcaagaaggttactgtatatgagacagtagagaaggaaatcaagaaggatcttccttcaagacttcatgctagaaagcagatggataaggttctttacacagttacagaagttcctacagcagctgctggaaagaagaagaatactaagactgttgatcttacaaacaagttatttgatgagatcgcacctaagtatgctggtcgtcagggcggttatacaagaatcgttaagattggtttaagaaaaggtgatgcagcaatggaagttcttcttgaattagtttaatttcaattgcaatttaagcgggtaaggaaacttatccgctttttttggaatctgcggtaagacttaatagggcaggaggtcatatgggaatagttaaagcaaaaaacctcacatttgaatatataagacgagatgaagatggtaatgttgagggaataactaaagctgttgataatgtgagtattgacattaagcagggcgattttgttgccgtgttaggtcataacggctccggtaaatcaacatttgcaaaacatctgaatgcgctcgttatgccgacagagggaactgtgtgggttgatggtatggacacaagggaagaggagaatactttaaaggtaagacagactgccggaatggtatttcagaaccctgataaccagatagttggaactcttgttgatgaagaggttggattcggaccagagaatattggtgttccaacggaagaaatatgggaacgagttgaaaaaagcctgaaagcagtaggaatgtatgctttcagaaaccagtcgccaaacaagctatctggaggacagaagcagagggtagcgattgcgggaattgtagcaatgaagccaaaatgtattgtcttagatgaaccaacagcaatgcttgatccgttgggacgaaaggatgtacttaatgtgcttcatgaattgaacaggcaggaaaatgtaacggttatacttatcactcattatatggaagaagtaattgatatagacaagctttatgtaatggatgatggaaagctggtaatgtcaggaacaccaagagaaatattctcacaggtggagaaattaaaggaattgagacttgatgtgccacatgttacagaattagcctatgaacttcagaaggaaggagttccattaaagaatggaatattgacttcagaagaatttacagaggaactcattagagttagaaatgagggtttcaatgtcaataatagtagataatatcagctacatttatgaaaaaggcactggctttgagaggcaggctttgaaaaatgtgagctgtgcaatagaagatggtgaatttatcggacttattggtcatacaggttcgggtaaatccacatttatacagcatcttaatggacttgttaaaccgactgaaggccatatatattacaatggcagagatatatatgagcagggctttaatatgaaagaattaagaagcagggtaggactggtttttcagtatcctgaacaccagctttttgagactgagatattcaaagatgtatgttttggtcctaagaaccttggcctttcacagaaggaggttgaaatcagagcatttgagtcgttaagactggttggaatagatgataatatgttttatcagtcgccatttgatttgtcaggtggacagaagagaagggttgcgattgcaggtgtacttgcaatgaaacctgatgttcttattctggatgaaccaacggctggacttgaccctaagggaagagatgatattcttaattgtcttaggtatttaagggaagagacaggaatgactattattcttgtgtcacacagcatggatgatgttgctaactatgtgagcagaattatggtaatgaatgatggagtgctgacatatgatgacactccaagaaatgtgtttaaacattacaaggagctggaggcaattggtcttgctgctccacaggtaacttatttaatgaatgatttaaagcaggcaggctttgatgttaatacagatgctatcacaattaatgaagcgaaggaaagcattctggctgccttaagataaaggaagtagtatgattcgagatataacaataggacagtattatcaggcagattcggtaatacacagactggacccgagagttaagcttatgggtaccttaatattcgtaatatccctgtttctgggaagtaatatatggctgtatctggttgtagcagcatttttggcgattgtaattgcactgtcaaagatacctcttaaattcattgttaaaggtcttaaggcaattgtaatattaattgtaatcagtgcggcatttaatctgtttctgacgccaggaactcctcttattaagatatggaagctgacgataacgcatgaaggccttaatacggctgtattcatggttataaggcttatttttcttattatgggttcatcccttatgacacttacaacaacgcctaataaccttacagacgggcttgaaaagggacttggatttcttaagtacattaaagttccggttcatgaaattgcaatgatgatgtctattgcattgaggtttatcccgattcttattgaggaaacagataagataatgaaggcacagatggcgcgaggtgcagactttgagtcaggtaatattattaagaaggcaaaagccatgatacctattcttgtgcccttattcatatcagcgttcagaagggctaatgaacttgcaatggctatggaggcgagatgttatcacggttctgaaggaagaaccaagatgaagccgctgaaatactccagaagagatattaatgcatatcttattatcgcattgtatcttgcgtgcattattgtggttaaggttacgcttaagttaatataatcagtgtgtacacagatatgacatttataatagtttgattctggcttttaaggaggaacgccatgcgaagaataaagcttatcgtagcttatgatggaacagaatattctggctggcagattcagccggaagcaccaactatagaaatgtatcttgacaaggcaattcgcgagcttacaggagaaaatgtgcatgtgaccggagcaagccgtacagacgcaggtgtgcatgcatatggaaatgtagctgtatttgatacggaatcgacaatacctggagacagattcacatttgcactaaacagattcctgccggattcaattgttattcaggattcatgggaagtgtcttctgattttcacccaaggcactgtaacacaagaaagacttacgaataccgcatacttaatactgctgttccgttgcctcagaagcgcaatttcacatggcatgttgcaggcagtattgatattgaaaaaatgaaagaagctgccgcatatattgttggtgaacatgacttcaaaagcttctgctgtgtgagaactcaggcagaatcgactgtcaggactatatattcacttgaggttctgcaggaaggcagtgagataattatccgtattaaaggtaatggattcttatacaacatggtaagaattattacaggcacgcttattcaggtaggaaaaggaagattcaagcctgaatatgtgaagcagatgttagaggcaaaggacaggactgttgcagggcagactgctcctccacagggacttacacttgttggcattgaatatgtggataatgatgacgcaagggttgtctgatgtggataacttttttggataaaacatttgcaaaagtatattgacacacgtggttatgtgttatataattcagaaatgtggcgtgataagtgcgcccataattaaggttttaagtgtttcaccaatgccccggagagacatttatatacattaataattaagcattatagcaatatttcaggaggaaaactaatgaaaacttatatggctagtgcatctacaatcgaaagaaaatggtatgtagtagatgctgcagattatacattaggtcgtttagcatcacaggttgctgctgtgttaagaggaaagaataagccaacttacacaccattccttgactgtggtgacaatgttatcgtaattaacgctgataaggttaagttcacaggaaagaagcttgaccagaaagtttactacagccactcagactatgttggtggtttaaaggaaacaacacttaaggaaatgatggaaaagaagcctgagaaggttatcgagcttgctgttaagggaatgcttccaaagggacctttaggacgtcagatgttcacaaagcttcatgtttatgctggtccagatcatgagcaggcagctcagaagccagaagtattaaagttttaatataaggacacatataaggaggaattaacagtggctaagaaagcaaacggaaagttctacggaacaggtagaagaaaaagcagtattgctagagtatatttagtaccaggtacaggtaatatcacaataaataagagatcacttgatgagtatttcggtcttgagacacttaaggttgttgtaaagcagccattagctctcacagagacagctgacaagttcgatgtaatcgttaacgtacacggtggcggatacacaggtcaggctggtgctatcagacatggtatctcaagagcacttcttcaggttgattcagacgagtaccgtccatcacttaagaaggctggtttcttaacaagagatccaagaatgaaggagagaaagaagtacggtctcaaagcagctcgtcgtgctccacagttctcaaagagataatattcgcgttggcaatgagccatgcgacagtaaatatgaaaaggcttcgcccatgcttgcatggagcgaagtctttttgtatttactggcatagggcgaagcccgcgaccgagatgaagcgtaagcgtaatcgaggtggcgtatggcgtagtagtggttgggagacagatatggtgtttgttctgttaaaatctgctccataaggtcagcagtttttttcttaaactatctaaaatagcggtgtatgtgcctgctgtaatccgaatatcggcatgacctaaatgctctgatacaatctttaaatcaattccattatttaataacaaggttgtatttgtatgtcttaacttgtgtaatgtaagatattcaaagtcagtacctttaagaaaacgctttaatgatgtattaagactactacggtctttataattaccagtagcagaagtaaaccccatttcggggtgagcaaaatcagaaccgatagccatttgtaacttgcgttgttctactctgtgcttttttagtaatgcaacaagattatcattcatatatgaatctctgatacttgtggctgttttaggtgtagtcagaaaatgtttaccacctacatcagttaatgtatgtctgatatgtatttttctttgtttaaaatctatatcttcccattgtaaccctaaacattctcatgaacgcataccagtataaagtaaaactaagataatggtattgaatgatgaataatccttaaataagtctaagaattttggtaattcttcagcggttagatacatttgcttctgttcctctaatggcttctttttaggaagaattacattcttgcatgggctttctttgatacatccctgtgtgacagcaaatttgaataagctctgtaaaatacagtatattctcttggcatacagctattaagatattcgggacaactgccacaaggactgttatattcgcccacagattgattattcatcatgcacatataaatcacttcctttccttagttcaatacatattgcttagatttgtggtttacagacagacttccgtacttcatgcggatttcatcgagtgatacttctttcttgtgatagctgttataatctccatagtgtcagcaccagcattttttctttggggcatatttgaaacctgttgatttcaatagttctcgatattcataaccaccatgaatccatatccaagaacctatgatttcaatatcagcattgatatggataatactgtttataacctctttaaaagccttattttcatcatcagtattataggtatgtgattgattatctgattgtgtttctttgcttaaaataacaaataagcggtcatattcattgttaatttcctgcgtaacatcaacacttccatttttattatcggggtggtatagttttaataattttctgtatttttttctaagctcttcgattgtttttgcgtctgtaaaatattttgtcataatgcaacaactcctttcgtgtatgtagataagcagttttttgtcatgcttaggacaaattagggcataaaaaagaacctcatgtataggactagtggggttcataactaaagattgatattaagaacaattaaccaagtggttctctttgcgtatataatttttatgcttatattggtgtttgttggtgtttatttggtgtttaaagttacaacaagatagaaaaacttatgataagatagattaaagaataccgctaaaatgctgatgttatggaagtttgtgataagttgcgataacttagaaaatgtagtggttagtactcaaagagataatatttcggaaacgcgagattcaagaaaagcccattttacaagggttacagaggttgtggacagttgtcagatgtgctggaatttaaatcgaatgcaacacatatggatatatgaatgtggagactaaggaatattacagcaaagaggcaattcagcgggagattaaggctggtaaccggacaggaacagtagaacagatggatgccaatgttgaggctatggctagggatttgcaggagatattgaggattggagcggaacagaagaggttgtgggaggtgtatgaggggagatagaaaagcctcacatttgatagagggtaaatcaaatgtgaggtttaatgattatcgaacttgcgttcggtgacgctgcatgatataataaaatgtagcaaaaaaggttaaaaacgagtagttgatattgttcgtcccatcgaatataattaatgggaaaagaggtaagtataatgggatacatgacagcgagccaagcagcagaaaaatggaatatttcacaaagaagagttcaaattctttgttcacaaaatagaatagatggtgtatttaaacttggtgaaaattgggcaattccagataatgctaaaaaaccaatagacaatagaaaaaaaggaaataaataaaatgaaaaataataaattagttgcaatagatttattttgtggttgtggtggattttcatatggttttcaacaagctggatttgatatggcattgggaattgatatgtggaaagatgcaacagttacatataagcataatttcccaaatgcgtgtgtaataaatgaggatattacaagtatttcatcagatgatatattgtcaaaacttaatatgagtgcagacgatatagatgtaattattggaggaccaccatgtcagggcttttctgtttctggaaaacgtatgatagatgatccgagaaataaattatataaatcttttgtgggattagtggatgaaattagacctaaagtgtttgttatggagaatgtaccggggttaataaggctattcggaggaaaagtgaaagaacaggttttatatgatttttcttcattaggatacggagttaaagtacagcaattatcatcagatgattatggagttccgcaacaaagaaagagagtgttttttgtaggagtaaatgagaaaaaaataccaccaaatgtaaagtttgaatttcctaaggcagaatatggagacggaaagaaaccatatattacatgtaaagaggctatttctgatctagattttgtaccagatgatgtatcattaggtgaaaatatagcatataaaattccagcacaatcagaatatcagaatttaatgaggaaagatagtgatagcataaaaaatcactcgataactatacacaaagagcagacgaaaaaaataatcgctatggttccagatgggggaaattacaaagatttaccaatagagttgcagaatacgagaaaggttcatatagcatggacaagaatgaatagtgaaaagccttgttttacaattgacacaggtcataatcatcattttcattataaggaaaacagagttccaactgtaagggaatcggcaagaattcaatcttttccagatagatttgagtttattggcataaaaactagccaattaaagcaggtaggaaatgcggttcccccattgatggcaaaagcaattgcagaagaagttattaaagtgataggagatgctaagtaatgtatgatcatagaaaacaattaaaatgtgcgattattagagctcgtgcaatctctgatgtagataatttgttgccaaaatatgcaacggtaattgataatttgtgcccttgcaccaaagaggaatttgaacaaggctttaatgatgcatttagagaatatgcaattagcagggcaagaaataaatctaatgaaagtgcgataaaaaagacacttgataatcacagaactgaagtaagtggatccctgtttggaatgcattatgaagttgatggaatagtatattcgtctgaacgcaataaaaaatttctagaagataatgatcagccagccttttttaaggattggttattaaaaatgcaattcccaaatggaatgcaaaaatcacaaacttatttaaagatggttaaagaaaaattatgttgtcatccttattcaatattgttacgtgtattagaatatgcaagaagaagcaatattgtattattaaaacaggaattaggatattatattttcaattcagaagacgtacttaagggtaatgctactgcaaatgaagtttttgatcaaataatgaatgataaaagaggtggaattccgccgagaaaaattattatcccggatggagaatctacttcatatgatcagcatgttggtgatcaactgaaatatttacagcttgcaaatcttatttacattgatggacaagaagttaagattaatttgcatgagatgaagtcaataaatagatttattgaattgatagataaaccattaggatttgacgtttataaatatgatttatctaatgtggaaaatcgtaagagatttgaaacggattgggctatatattatggtcaattaagcaaatatgcggatgatttagctactccagttgaatcactattacttccagctgatgaagaaccaaagaaacctaaacgtacaaataataagattgaattaggtgatgaaggggaagagtttgtacttaattttgaaaaaaacagagtctctaaatttaatgttcatttggttaataaagttcttgggttagggaagacaaagggcttaggatatgatatacaatccgtaatagctgaagcaggtgagtattcagagtttgttaagtacattgaagttaaatctacaaagagagtaacggctccaaatttgaaagatggagtttggacagatacgataaatataacaagaaatgaatggattgcagcaatgcaacataaagaattctattctatatatagggtatattttattcgcggcggagttgttatgtatgttataaacaacccatatcaaaagaaaatggataatattatagatgttgtcccattaacctatagagttgattttcataatgattctatagatgaaagctacaaagaggtgaatagcaatgtttaaagtggtatctttgttttctggttgtggaggagcagatcagggaataattggtgattttgtttttaataagaaaaaatatgaaagacttccatttgagttagtatatgcgaccgatattgatcaaaaggcattaaattctcatatgaagaattttaaatgtgaaaatgttgtatgtaaagatatatgtgaaactaaatctagtgaaataccagaatgtgatattatcgttggtggatttccttgtcagtcatttagcacggtcaatcctacaaaagatccattcgatgatagggcaaatttgtacaaacaaatggtgcgtattgtaagggataaacagcctaagatttttattgctgaaaatgtaaagggaatgatgactttacataaaggtcaaatatttaatagaataataaaagcatttgaggaagtgggatatacaacatatactaaattatttaatgcagctgattatggtgttcctcaaagaagagaaagagtaattatcgttgggattagaaatgatctgaatgatgtaatggaatatgaatttccaaaagaaaccaataaaaataattgggtgcctttgtctgtagcggttccaaagcttgcaattgagcaagaaaagtattatttttcagagagagcagttcaaggaatgaagaatgccaagaataatatgaagcgagggttatatcaggatttaaataagccttgtttaactgttacgagtcatcttgcaaaagttagtttaaattcaagggatccggttcttttggtgaatccagcaaaggagttatatcgaagatttacaccattagaagcagcaagaatacaatcatttccagatgagtttatttttgtaggaagtgaaacggatgcatatagacaaattggtaatgcaattccaccggtaatgttttggcatattgctcattcggttaaagattacttggaaatggttgaattggtagagataaaggaagctatgtaacaataatatgataacaaatatgatcggagagttagctatgaagtggattattaatatgagagtgaaagactatataaggaactggagcaatcaagagataattactgaatatgctggtgttatggttaatattaagataaaagatacaaattgcctgttgattttgaatggaaatcataaccatgataaggtcttaagacttatttgggaattgctatcactttttgatggatatttttatgagcctgtttcatatgaagttgatggaaatgtaaataattataaacaactcataaagcttgggtattttgaaacggatagaaagtggtattgttctgaattgttgggaagagatgaaagagtattatcaacagaggtaataaaaaaatatgatgaattcagaaataagggaatagctgataaaaaaatgacaaaatctgttgttaatgcattttattatcttaagtcgaaagattatggaaaaataaatataaatcataggttgtcattactgttaaatattgctgatgggtttataattaatacattcaaggatatgaacaatgtaaaagccagtttagatagattatttaagaaaacagtagatatgcagaaattgcaaaaaggaatttctttgcttggacttgatgcggagaattttaagtatattctgactgaagaaagaaatgtctttgatcattacatttactctgaaaacagtttagctactttcgtatataatgatgaaggaaaaattacaaattttgcaacatggtattttgtttatgtccttgaattggtaatacgaattaattttttgaaagaatccggagttatattagataaagatgcaattgattatgctttggattcaataaacgactggataatatatgaaaacaatttagatgaaaaatgtataacgtctcattataggatggcacagttaaatagaaaacttggagttgatataagataataggcaaaaattattttaatgcacatttagatagaaggagaaaagcttattatggatacaatagagatacatagtttaagtgaatatatagattttgttgaacgaatatcaccacaatattcactttcaagaggacaggaacaagataaagatttattgccaagtatattacgaaaagacgacaatggaatggcactatatactaaggcaaattcaaaatcatttattgatgattttaaaagtaattcaactatgtatatagataatacaatgataaaaaatcaaaatgagttgcttgtatatgctcaacattttggtgtgccaacatgtttattagattttacatattcacatttaatttcattaatgtttgctgttgaaaatgcttttacttatgatgcagatgacgaggaaaaatcggttgtttggtttttagatccaagagaattaaatcttaagtctattaaaagaaccgaacttttagatttgtcggaagaaataagtgttgatgatcgtacggaattaccttttgcagttaccgttagaagaaataataagagaatagctgcacaaaatggattattcgtgttttttcctcaaaatgcagaaccattgaataaaatatccatagctgaaagggttctgaaaaaagttgaaatttcacataagaattgtagaaaaatactcaaatctttatatacgatgggaatgagatttgatgatatctatcctgaattagcatcgatctctaaagatattatattgaaaaataatgtaatggaatattataaaatggaggatgaaaatgattgaagaagaattcattgttaaaccagatcaggtagattatacgattggaaatattgttggagctattgataagggttataaattacaaaaaatggaaaacgaaaaattagatatagaacagcgattagaatttagcgacagtattattatgaaaccagattatcaaagagaatatcgttcatcaatagaagaagaaagttctttgatcgaatctattttagttggaatacctattccacctgtttttctatgctcaacaagaataaaaggtgcacaatcattgaacgtagttgatggtcaacacagactctttgcattttatagattcagaaaaggaaagtttgcgttaaataatttatgccttttacaaaaattagagggattgacatttgctgagttaccagaggaattacaagaaaaaatagtaacgcataaactatctacatatgtttttagggattttccaggaaagaagtttgaacttgaaatttttaatagatataataaaggaactaaaactttgacacaacaggagatacgaaatgcggtatattcttctcctcataatgaatatattggaaaatttgtcaaaaaattgtatgagagtaatgagccactaaaagatgtatataatgttacgaaagatagatatttaaagaaaaaagtgcatgaaggtattttttcaatattgtatgttttggaatttggtattaatgaggagtttaaagactcgacaacatatgcaaacgaatatatgagaattaaatcagaaatggttgaaaaaaatacagaagaacaagttcaggaggatttggcttcatcaataaagaggtttgatcaatttaataattggttattaaaatgtacaaaaattacaccatatccactatcaaaagagttttatggtatagcaagtaaaagttataaatttcaaacatcaatggcacttatattgccagctttatataagaaaatttatgatgaaaaagttttaggtgatatatcatttgaaaaagcaatagaaatgattcaaaaagcaatgcttggttcatttatagaagatcctcattatacagcatcatcaacaaattctaaagagataaaaaaattggttaattcatttggaaagggaaattaatattaaaagattcctgggaatgtgtggacagtcaaccgcatacaacacatatgcaacactactatacacaaattccctatttctgggcttttctcgctctcaaaacgctctcaaagagataatctttacaatccaaagcgtcttatgacgtttcagaaaagtatattacacctcggaatttcggttctggggtgtttttttagtttgtgaactatggtattattatgatataatgatttttcaaaaggtaaagcgagaaatatgagatttgataagaaaacgttttaataatgtattatattatacagtacaggagagccatatatgattaaaatagcatttttcgatatagatggaacattgttgaaaatgggaaataaagaaccgacagataaaacagttaaagcgttaaattctcttcaccagaatggaatattgctttgtatggcaactggcagaggttatctttcaatccctaaattcaaagatattacatttgatgtgcttctaacatttaatggttcatatgtaatggctggagaaaagattattttcagaaatcccctgaataataatgataaacatcaaataattcaaaatcttaataaaatgaacagagcagctgcaatcagcaatgagcattttattgttactaatggcacagatgagcatctggaagagtactttaaatttggaaatgaaacattgacaattgcagataatttcgatgagttatgtaaagaagatatttatcagattatgtgtgcgtgtagaaaagaagaatacgcccagatactgcaaggaactgaaaatacccagataactgcatggtgggataaagcagcagatataattccattgaattgtggtaagggaaatgctgtaaatgcagtgcttaattattatggattatcgaaagatgaggcgattgcttttggtgatggtagaaatgatattgaaatgctagaagctgttggtacaggagtggccatggggaatgccattgatgaagtcaaagcaagagcagatgtcatatgtaaatccgttgaagaagacggagtgtatcattactgtctggagaaaaaactcattcaatgttgatggactaattatacagcagggttgcagagtgttatatactctgcaaccctgctggtcatttatagtcttaattttaccaccacttctcacggtaagaatactctccgcggtaattagaagcattataatcaggatacttgaaaggtgcatatacatcgtccttaggtgcatcatcctgtgtatatatgtacatagaatcataatcccatgtgacaatttcatcacgggcatcgccgtagaggtttacagcttcagcacacatggtaggatgtccatcatcagggaatttaacaacctgaataccattgccgtcaatcattccgccgcgctctatatcagcattaagaaggatgaagtcctgaccgtcgccagtccagtttacaggagttaagagattgccattaagctcattctccatttcccataactgattaccctcgctgtcatagaaatatataattccctggtgtccccagaaattaacaacaaccatttcatagcccgggcggtttggaagataattagcaagacttacacgctgtgcatggccgataccgtccttcttaagaagctttccgttaaaatcagatatcaggaagccttccttacctgcaacacaggcaaagaatttagtgcctttgtgcggtcctgattcgaatctgcctggaacaatctcatcaatatggtcttcattaacaggcatagtccacattttattaccgtggcagtcaagcatgttataaccaactaaaagttcatcatgtccatccccgttaatatcaattgcaaaaggaaaatgtccggtattcttatcactctggaaatgccacataacctcaaggtcatcgttaagtgcatacaccctgcaataacgatctttaatgagaatatcgcgtggtttatcaagaccacggaaattacatatacgcataccgtcaggattaattctgtcaaatgcgtagattttatcaggaacaccgataatagttccgtcttcttctggtgtagagaaaggtgttttggcacgtttcttcacttcacctgttctgccatcaagaatcagcacttcaaaattcttggctgttataacctcatcaaagccatcaccgtcaatatcatatatctgcataggcatatctgctgatatagttccaatgtcgtgattgtcagtaggttcaccatgctgccataatatattgccatcaaggtcaaatgcggtgagacagctgattgttccataagcatcacggtttactcttttctggcactgagccataaccatctgatattcgccgttgccaagcagatgaccaaaacgaagctgtcttccggtgccgcagcctttgaggtcaattttcttaagaagcttcatcttaggataatgtgcctgtgcatcttcacattcagctttataagcatttcttgcagcatcaatagaagcagcagtactttcagaagtagtaacatttacaaaaccaaactgtgtagggatagttgcagtaatggcaaccttgccaccctgtctggcatattcagtgtcaagctcaaaataaaccttatcatcaacgctgcatataagatggctgcctttaatctctgctttaagtatataggtatcatcacagttgtaatcaaaaggtacagaatcgagtacagtaacatcttccttgtgacggtattcaactctcagttcatgctcttcaaaaacaaggacaagaagattagcagagttctgacaacaaaaaccaatgccggcattgccccatttggtagtaaacatacgcacacttgcagttacagtataatcacgccagaatctgtcaccgcttgtgagcataggaaatgtgcggtgtggcttgtcattgcggatacgcatctgctccatgaaatgttttccattatattcagaaataatccatgaagccccctgaccgttataaacatggttgcataccggatcataccatttaccataatatccgggataatggataaaatgatactcacccattgccgaatgattcttatcataaggaaattcaccaataggaaaatcagagaaatcttcattaagtaaaataaaatctgccataataacctccgttctaaaataaaaatataattaatggttctttctgtagcttccgggcgcttcgcccatgatttttttaaatgtaccgcccatagtattactgtcggcgaaaccacatttgtcagcaatctcagtaatagagaggctggtgttgactaaaaggtctgctgctgcgtgcgttcttacataaataagatactctctgaatctgaagcctgtaaaagccttaaatttcttggaaaggctcgattcactcatattaaaaagttctgcagtagcagccatagttatgtcattgtgataattctcgataatatattcaataaccttctggataagttcattacctgtatccattttcgtaataacattatcttcatacatctgacagcgcagaataaaaagtataagttcatgaaaataagaatgtatgaaagataaagacagactatctacaccattgtgttcataagaaatcttctggataattgatgatatataatcaagtcgtctttctggtatatggacaacaggatgtttatggaaaatgctttctatatccagagaggaatcatcagcaatccactttaaatcatcattattaaaatataacacatatcttgtatggtcacttccggcgaggtaagtagtcatgtgcgccatgtctggtgggataagagcaagtccgcccggatttaacatatatatttcatcacctacataaagggtgcaggaaccagaatatataaacatcagctcccatctgttatgttcatgaaaatgtttcatcttataagatggaggcacagtagcaatatccgtgtggaaattgtcattaataaaatggtacattgccgtctccttggtatatgaataatatcttacgaagcaaaatcatatactgattataggtcgtttatagagaaactgttactgattttttacatatttttttgattttgaaagatttcgtgctgtttttttgtatctataaaaaaacaatgtgaatataataaaagcatcttaagaagcagaaacaatttaatattaaggaggaataatatgatacgaagaaacaaaattattgcttctgttgctgtcagtgtcatgactggcgttcttgttgcaggcaacttagctccattacagggatactatgcatttgcacaggaaacaggagtaaaaactgcaaggtattcagcagtaaaagacattaacaaaacattagaaggttacacaccaatcgacagttcagatccggttgaattcggtggaacttacattaagtatcagggtgagacaatccagttgtcggagacagccatatatcttgatggatcgttatcagatgagcttgctgcccagtacccatatgtatataacgatattactaaggcattgtcagcagatgcattaaagaatggaacagcagacaaaccaatgacagtatatgttgcaccatatgtgtactggatagatgatccggcagcaacagatatagtacagaagaccgagggatattcagcaccttatggaatggttgttaattcagattatcttactatcaaaggtcttacaggaaatcctgataatgttgtgctagccggaaacagaggacagtcacatgcctctaacggtaactatactatgttcagattcaactgcagcggtgcacttacagttaagaacataacaataggtaactattgcagcgttgatcttgattatccgcttatgagcgagcttaatcaggcaaagagaacagagacaatcacacaggcacagcttgctgatgtttctggagataagatgtttgcagataactgtaacttcataagcagacttaatcttgacccaataaatggagcatcaagaagtctttataataactgtcattttgaaagtacagatgatgctctcaatgcaaatgctgtatatgtaggatgcgattttgatttctatggaaacaggccattatattcatcatatggtacaggttcaacattcttaggttgtacatttaattgtaagatattaaatgttgaagctgaaccaacacagttctttactaaggaaggcggtacaattaccgcaatagattgtgtatatcacagtaatttaagtgtacctatatcaattggatggactaaaacaccatcaacttcattaaagtgttatcagagcaacataattcataatggacagagcatcacaatcggtggcgagggtgctaaagaaactgttgatatgacaggtaaatcagtgcttaatgcctacaaggtagtatcaggtggtaaaacatattacaatacatataatcttttaaagggcagtgacgactgggatccattaggagttaaggatgtaattaaagcagccggacaggacacagttgcaacacagctttcaataacatcagatgtcacagagattgaatctggaaaggaaacagcttcaataggaggaacagttaactatttctatggaactaatgatacaacacagaagataacatacagcgtatcagacgaagataaggcatatgtgaagttaacagataatggcgacggaacatgcaaagtagaaggtactaataatgatgatgcagctaggaaggtcattataaatgcatctacagagtcaggtcttgaagcagcagttggaattactgtaaagccaagcaagatagaagcaccagcatttacaaaggcaccagttattactaatgacggacagggaagtcttaaagtagattactcacttgatttaggaagcagagaagacatgtctgcaatctcatggtacagatgtacagatgcagagggcagcaatcctatacttgtagcagtaacaagaaatgattcaccagagtatacatataagttaacagcaggtgatgtaggatattacatcatggctaaggtagaatctaagaacatcagaagtgattatggaacaccggaaaatacagtatatgacaaggcaatcggagtgaaagatgtaagaagcaagaactttgctacagatttctctaacttccctaatgtaaagcagtcagaaatcaaagctggcttctggactgtagattataaccgtccggcagatacagaaagttttggaagctggcagggagctgatacagaagaaccttggaaatatggaacaacaggtaacggctgtgtaggcgctggattatatgaaggtacacagggcgcaagacttatgtatacaccagttgaaggaacatatggtgacatgtcacttaagcttgtagttgacccagccaagacagcaggtcagggatttggtagtgcaggacagtatatggatgtacttcttaagttcgatacatctacacttacaggatacggattaagaatagtaagaacaaaggcttcatctaatgccgtaacatttgtacttgtaaaatacgacaacggaacagtaacagagatttctgatgaagttatcgcaagctgctatgcaacaggctgtacaatcagcttaaaggctgaaggcaataagctcacagcacatgttgagacaccaacagaacagcttgcagaccaggcagctaagggatatccacatgtggttgaccttacagcagatattgaagctaacagctttggcggagttgcaatccagcatgcaggaacacttggcgcaggcggatggcagaacacaacaatgcttcataatttagatattacatgggaaggtgagaataaccagaacccagaatatgttgaaggaaatccatcagataacgagaatcctgccgagacacctgatgattcaacaggaacatcaacaggagcagacacaacagtcaagactggtgatatgagtcatacaggaatgtatgcagcattaatggcagcaggacttagtggcttacttggaatggcagcagtatacatgagaagaagaaaagatatctaatttcataagaattttctttacaggagcacccgcaattatattgcgggtgtttttgcgtggtgaatgtgtgaccgtatgtgattgacattttaattattatgctataaagttttatagaactaaccagtataagatggaggataaaacttaaaagcatgaaatataatatcagaaaatatatattggcaggaattacagcaattcttgcagcggctgttttgacggcatgtggtggcagtaagccagagaaggacgatacagtcaagagtacacaggaaatatttgcaatggatacatatatgtcgcttactgcatatggcagcaattcagaggaagcagtaagtaaagcagttcaggagattaaccggcttgatgcaatgttttcggtaggaaatgaggacagtgatgttactaagataaatgaaaatggaagcggtgaagtatcggaagaaaccgcatttataatgaacagggcaatgcaggtatctaaagaaactaaaggtgctttcgatattacgatatacccggttatggagctgtggggatttaccaccaagaattacagagtgcctaaaagcagcgagattgcagaggcacttaagggtgtttcttatacaaatgtatcagtaaacgggcagcaggtggcactgacaggtggttccagcattgaccttggcggtatagccaaaggctacacatcttcgcgggttatccagattatgaaggattgcggcattgagcatgcaattgtcaatcttgggggcaatgtgcaggtgcttggaactaagacggacggttctgactggagagttgccatacagaatcctgcaagtgagaatagttatctgggaatattaagcacggcggataaggctgtcataacatcaggtgggtacgagagatattttgagcaggacggacaagaataccatcatattatagacccgcagacaggttatccttcagacagtgacctgacctcggttacaattgtatgttcagatggaactacagcagatgcattgtcaacggcactttttgtaatgggcctggacggcgctaaagaactttacagaagcggggctatagattttgatatgatactttttgatggcagtaaagtgtatgtgtcagaaggaatcaaagacacattttcaacagatatggataaggaaataattaccagacatccttaatgagaattattattaactgtctgtattgacaaatgtggtgagaaaaatatattctatagagcagttagcgaaaactaattacagatagattaatatacttttgttgaagacagctaaccaagatatacagacccgaaggagcagacatgttattaataatatcacttataatcgtagctttatttatatattttctcaaagattcacttaagaaatatgccaatatattttatataggtgtggcagtaatctctattgcagtattcctgcttgagtttctgtcaatgcctttgtttgtaaagaacaatatattaggaatatttgcaaaaggctctcttggaacggcaatgtttgttgtggtaatgtacactggcgcattacctaagggcaacaagctgattgcaccgcttatgaagataagaggtgaattgtcaattacagcggcaatacttgtcctgtgtcataatttcacatacggaataacatattttaaaatgctttttattaagccggaggcattatcagcaacacagcttacagcagcaataataagccttgtgcttatcataataatgattgtgcttacagtaacttcatttcaggctgtaagaaagaagatgaaggctaagaagtggaaacagttacagcgcacagcatacgtattctacggtcttatgtatgtacatataatgcttatcaatattccatatgcaagacttggacttggtacttatattgcaaatgttgttatctacagcatagtcttcttaggatatgcagctatgagaatagcaaaggttgtatcagtaaaggcagcaagagccggaaagacatacggtaagaaaccagagacggttctgtatggactggcattggttatatgtgcagtgatgacggtgtcgtgctttgcaggaagacagacagtgtcggcatcggaagacaatgaggaatggaacgatttctttaacgaagagacagttgcagcaatggtcaaagagattgagagcagtacggctaagacagatgccgaaggaacaacacaagagagtctggaagaatcagtttcatcggatggacagtcagactcacaggctggtggtgcaggaaatgaaatgttggggaatagcaataattccgggtcggataatgtttctggtaattcatcaggtaatagttctgacagtggtaatcagtcagccaagccggataatggttctgacaatagtggagagctgagcggcggttcaggcagtgacgcaccggctaatacaaaatttaaagcagatggaacttatacaggttccgctgtgtgtgagacttataactataatgtaacggttacaatagtcatatcgggagatacgattacatcggttactgctgaatcagaagcgggtgcgcaggatgtgcagtattttaatatggcaaatgcaaaggttcctgcacagcttcttgcaaatcagagtacatcaggcgttgacagtgtttctggggctactaaatcgagcaatgccatcaagaaggcattttactatgcttataaatcggctaagaagtagagcagatttgtaatagaaaaaattataaggaggcaaaattcctctcctcaccaatgggttcggattttgcttcgcaaaacaaggaggaattatgaggaagaacatttttactaagattgctgctgttgcagccgctactgttcttgcagttacagcacttccagctcttgtgtctgatacacatgcagcagatgatgagtattcatatgtatatgctggacttacatggcaggaatactgggctaacgagggcgtatataacgcaggagatgtaacaacatctaatgagaaggatacacatggtgagtacgataaaggcggttttgatacagtaacaagagctacaaccaatcatggtcttcacagaggaagctaccagtgcatggcaacaattgatacagaagatggtaagaagtatgagcttgccggctggagcagtgatggaaagcagatgatacttacagatggtacacagctttcatacaacagaggcacaattactaatgcagatggttcaacatctaaagtttcttcttatgatgtaactggtattaagtatgttccggttaaggttaagacatctgatcttgctgattttgagcagcattacagagttgtcaagaatggcgagaagttatacggtggattcggcgagaacaagcttagctcatatgagtatacagcagcagttaatgcagatactaacggaattaagacagcagttaagaatgcagatggaacatattcattctctgcaagacagactggaagtggaaagtcatttgcagagcaggatataagtgtggctgctaacattacatctacagtaaaagatgctacaggttcatacggtgaattcttaagagttgatattaatggtgatggttatggcgcattaggtgctatgatgcaggctgttaagtggacatattatggaaatgatgcaacaagaacaaatgctgttgctacatatggtactaaattcgcagcagataactggatgcacaaagtaatgggaatccagcttggacttactgattcagcacgctgccagttaccagcaggatatgatggaacaggttactggtcacttactgtatatgcattaggatatactgatactacaattgattttgaagcaactgatgctaatatcgttaagattaaagcacctgtaagtgatacatcaaagctttcagcagctattgcagcagcagatgcacttaacgaagctgattacacagccgagtcttgggcagctatgaagcttgagtatgaggaagcagtcgatgcacttgcagttgcagaatatcaggcagatgttgatgaggcaacagagcatcttacagcagcaatcaatgcattagtaaaggttgatgcaggtacaccttctgattcagaagagtctggaaacacaactgatgcaggtacatcagatacatctgtatcagatgttaagactggtgatgcagacaacatggcagtatattcattagttgcattacttacactggcagcaggggcaacagttgtatcaagacgcagaattaaagacatcagataactgatatgcttacaatcataataaaactataaacaagccagagaaccggggcggagagaatcctttgtgggattcacttccgctccggttctttaatacctgttaatcttaatatcccccatattgacatcagcatttatacttttaccgctgcctgcattattagtatagctgtgagaataagtagaatcattaactttaatgtcgcccaagtccacagagaggttggcgctgtatttatcaatatccataccacttattttcagtgagcccatatcaacggaaaggttaagaacatcactgccgcaattggtaagcttaatatcacccatattgttgtcagcagttaaattcttaacggcggaatcaacaatcttaagagaacccatatcaacagagaaatcagcagaagaagcatgtatattgttaacatccatatcacccatattaaggtcagcctgaatagaattaagactgatattgtcaggaatagtaattgtaagtgtgcagtctgagtttttgatattagtcataagatgtacttttacatgctgttcaatatttaatgaagttccagaaacagatacagcaggtttaaacttttcagcacctgtatagataacttcaagcttgctgcctttcttaatctcaacactgccaagattcatatcaatagatatgtctgacacattatcataaatagaggaattttcaatatatttgccactggatgccatagtcatgcgtgtaaaaggagaaatgttaaatacattaccaagaacgccgataattatgcatataagtgtaataaaatatataattgacagataaattcgtttcttcataattacacctccctggaatcgtctttaagtatactcttgaatatagcgtgtattacagctgcaataggccatataacccatgttaaagcccatgcaaatgtgatgaaactgactgacagatatatacatgtaactgtaggccagaaaacagacataatagttgttgcagtattgttaatatatctgacttctttattctccttcttaacatagctgccggctacattgtcaccattaagagcaagtaaagtcttacatgaagtttcaaccattgaaccgaaaacaataaggaatacgccgacacttactatacaaatcattgctgcaccgccgatatcgtcaagtccctgtacggggattgcatcaaaaacagcggcagggacaaagctgatgatacacattataattcccagggtgcggcacacaatagaaatgttacgaagctgatccttcttatcctgcacatatccgacagtggcataatcgatgatacattcatgtttcttaatatagttgtatttactcattaaagaattggttattataaatatgccaacaccgcaggctgctataataaacagagcaactgtgcccattgtctcaataaaattattatgaattgcactgcaggctgccgctggaactactgagaaaatacataagaaaactcctaatgcagtcaggaatgcatgtcggatgctggcacttacaaagctcctggcttcatcctgtgttaaagttcgtctgttatcaacaggagcagaagactgtctgttaagtccgagagtttctgcgagttcgtcaagattgccgaattctgagataacagtgccaacagcctcattctcgcttttaccttcactgataagttcattatatttgtcctccatcatgccccacagttcatctttagcctttaaaacttccgctgttgcggggagattggcaaacatagtttcaagataacttttaatagtatccatacattaattctccttcacaataaatttttcaataacttctttagtgagagcccactcttcacattttgactgataatacagccgtccttcgtcagtaatctgataataggtgcgcttctttccaccattctcgcctactccagggaaagaagtaatatatccattcttttccattcgtgtaaatgcggagtaaagagtagtttctttaacaatatatttctcattggtcatggctttaatctgcttagaaatctcataaccataagatggcttatcaagcagaagatacaggataattgtatcgttgtagcctcgtataatgtcgctgctgatgccagccatgcatactcctcccttcgaattaattgaaggtgatgattcacctgataataaatattaaataaatgataattactacgacaggcgatactacgacagccgtagtacatctgtcgtagtatatataacatgatatgcataatatgtcaacaggagaatataaaaatccctcaaaagcaggtaaatagtgcttttgagggatatattaaaaatgtggattatttgaaatatactttagctgcagtagcagccatgatattttccttgtcgggtgttgatatttcattgcttaagacaatgtaatcaataaggtgtctgtagctgtccttgcacagattcataggcaggtcgcttccccacataagccggtcgcttccgacaagttctatggcgcgtttaatataatggattgcgtcaggataagggtatgtggcatctttaccctgattagaaggaaggcttgcaaggtcgaatacaacattgtcaagcgtaagtgtctccattcctttaagccagacatcttcctgaacaagacctcttggggcaagcagatggcacacaacaaactgcgtgtcagggtgtctcttaattgcgcgagcgagggcttccggctgccagcactcggcaggatagcggccgatgtcgaacacaacagtattattatgcatttcagcatatgacagcatttcctcaataacatcaccatcaagagcaatagttgggtgataactcataagaccgcttcctgtgctgacttcgaactttacaatcttaattccgaggtcttcaaacaaatgctttcgtatagagtcaacatttctgcagaatgggtcataagtagctgcggcagcaaggcggtcaggatatttcttcgctgcctcgtaagtgtagagattctgaggacctaagaaattgccctgaagcataactgctttggaaacaccagcttcgtccataaccttaagaactgcttccggggttacatcatattcaccgagacactctggtatcatctggaatatagttccatcagcgtagcttgcgtaacctccgcctatagcctgcatttctccgctgtttccaaatccattgatgcagcggcatatatgaatgtgtgagtcaattatgttcatagttaagcctccttgttgctggatgttaatatgtaatctccctgccttcttttctccactgtctgaattcagcagaagcagaaagtaaaaggtcagatgatgagttaagtgcagtttcaacagaatcctgaataacaccgatgatgaagccgattccgacaacctgcattgcaacatcgttaggaatgccgaataatgagcatgccataggtataagcaagagtgagccgccggcaacaccagaagcaccgcaagcagaaagcgctgcaagaatacttaaaagaattgcacttgggatatcaacagtaatacctaaagtattggctgcggcaagtgtcataacagtaatcgtgatagcggcaccgtccatgttaatagttgcgccgagagggatagtaacagaataagtatctctgtcaagccccatatcttcacattccttcatattaataggaatattagcagcagagcttcttgtgaaaaatgcagtgagagcacttttctttaaacatctgaatataagtggataagggttcttatgtgtacaccagaaaacaagtatcgggttggtaacaaaataaataaacagcatagtaccaacgagaagcataagaagctttccatattccttaaatactgacataccattgtttgacacagtatcaaatacaagtcccataataccaaatggagcaaagttaataatccaggtaacaaccttggaaagaccattagatatatctacaagcatatccttagtagaatccttggcatgtctacatgcaataccgataacaacagcccatgcaagaatacctacataattggctttagtaagtgaagttatgggattttcaacaatgttcatgagcagggagttaaatacatcaccaatactgccaggtgatgacatttcctgtgcaacttctgctaatgtaagagttacaggaaataatttgcttgtaaaaactgcgattacagaagcaagaactgtactgaacatatacagaataattacggttttgataacaccgccgtggctttttcctgagtggcataaagaacttataacaagcacaaaaacaagcagtggtgcaatagccttaagtgcaccaacgaaaacgcttccgaaaagagcaatgccggaagcctttggaacgagcagaccaagaataataccaagtgtcagtcctccaataattcttttaatgagactaatactaatccatttgtctaataattttttcataaataatagaatctcctatgcaaaacttttattattataaacttgtatatatattttgccaactaatactgtaaagaataaaaaatatattgtaaaatataaagcgattaatatatataagagagaaaatgtcatgaagagaatctataattatttaaagaaagatgcagtgcttacaataagctgggtgcttgcaatcatttcaatgctttttataaaaccagataaagcgtatgccggttacatagactggcgttcacttggaatattgtggagtctgatgataataacgaaaggctatatgcagaacggcatttttgaaaaaatcggacatgcccttcttacaagaacacgaaaaatgtggcagcttattgcagttcttgtaggactgaatttctttagcagcatgattataacaaatgatgtgtcgcttataacatttgtcccatttgcaataatgatgcttaagcagtgtggtaggcaggagcttatgataccagtagttgtattgcagacgatagctgcgaatcttggaagtatgctgacaccgattggtaatccgcagaatctgtatctgtatggactggctggaaaaggaatcggagaattcataatgtggctgctgccatacacaatagtttcagccctgcttctggttatatcaatccttcttataaagaataagaacgaaataatatgtatagaagatacagacagcgaagctgcacataatacatcagtgccacgagtcatggcctacagcgtattatttattcttgcacttttagttgtcgcaagagtgttgacatggtatatacttgcagcagccgttctcataacggtattactgctggagaaaaatgtgcttgcgaaggcagattatgcactgctattaacatttatcggattcttcatattcacaggcaatatgggaagggttgaacctgtggcacattttcttgcaggaatcgtgaatagccgggagctggaagtaggaataataacaagccagtgcataagcaatgttccggcggcattgctgttatcaggatttacagacaatataaagaacctatcaataggggtgaacatcggaggtctcggtacgcttatagcgtcaatggcgagcctcatatcgtacaagctgtatgccaatgaagtgccagagaaaaagggaaaatattttgccgtatttacagtttacaatataatatttctagtggtgctgtatgtgtttacgaaattgatataacatatggaaaatcttacataaaacaggaggggaagaaatgtatggatgtccaggttgtggagccgagttaaaatacgatataaaaacaggtaaattgcggtgttcacgatgcggtaataaatatgatgtacaggcaataaaaaaggacaaagatgctgaaagttctctatatgaaataaatgaatatgtatgtccgtcctgtggcggaagaatatatacggcagataatacgatagcgggattttgcagctattgtggtgcatctgcaattttacagcagagaacggaaacaatagatgcgccgaaatcaatagtcccttttaaagttgaaaagcgtgtatgtaagacaaaattcaagaattttgcaaaaaagaatatgtatgtacctgatgaatataagacagcggacggaatcaatgaattcagaggaatatatctgccatatcatagttatgatgcggagtttgccggtgtttatgatgcatatggcagtacagagacaactaaaaagaaaaagaagaaaatatatacaacaaaaaaatactggaaaatacacgcgccagttcatggttatgtaaaaggtattacacatgatgcctcgggattattccgggatgatttaagtgaggcggtaaatgatgcaactgattcaaaggcagtagtggatttcagaccaggttatctgtgcggattttacgcagatatgtcggatgtgccagcttcagaatatgagaattatgcatatgtcaattcgaaagaatacataaataatcagattaaatgcaaagtcggaagcaacatgtacataaataagacagaacaggagccacagattaagatatcctgtaaagaggacattttaaaaccggtatggtttatgtcttatcagaacagaaacagggtagcatatgctgttattaatggacatacagggaaaatgaattgtgatctgccggtagattttaagaagttttttggtgtgtcagcaatcatatcagccattttatttataattcttatgtgctttcagagtgtcatgtttacagcaaagacaatgataggaatagcagcagtatttaatcttatagcaggtttattttacgatgccaacataagaaaaatgtatgacagggaaataaaaagaacttataaattgaaaaaatcggacatatcaaaattagttgcaattacagttggagcatttatgctcatgtactttattataagttttgttataacagttaattctgaatacagggaaagcagcaagtgggttaaagctgtaatatgtgcagtaacatttgtaatgcaggtgattatgattattaagaactatcataaatatgaggcacttaagaagaataatacagtgccatcaccggtttttgtgctttcagttataattaacataatcattatggcagtcgcagttattaatcctgtgcatgatatatggtattatgtcgcgacagccatggcattggcatcagaagtaattgtggtgattggaattataagagattataattacagctgtacaagaccattgccgcagtttaaagaatacaaaggaggacaggaaaacattgagatatcttaaaaaatttctgacggtaattataattttctgttcctttattatatgcggcatatctggcacacagcaggtaagcgccagtgaaagtggtaaaactgacaccagttatacaataatatatgatgatagtgcttatctgataaaagatactgataagccgcagttgtatgatgttatggaaagcatatccaaggatacaaatgttatattttatacaacagattcaacagaatatggaaggaacacagctgatatctgtcagaattattgtgcagaacattttggcagttcaaagactgcaccagtaataatgtttacaatagacatgtataacagagaaatatatatgtactgtacaggcagtacgcgtaaaatagtccggaatgcagaagctaattcaataacagataatgtctataaaagtgctacagcaggagattatggcaaatgcgcaataaatgcatttacacaggcagaaaattgccttgcaggtggtaaagtcaaaagaccaatgcagattattaataatgtgttactggctatgctgctcggagtaactgctaattttacagttcttaaaatatcaagagcaagcagaaaatcagcagatagatgtggagaaatggttggaatagcgaacaattcatttgttagtgtaaaggtcagcaaggaactgataaaggaacatactacggtaaggaggaagtcatctgattacaatggtggctctggcgattattcgggttctggagggggttcgtctgacggaggtggaagttccggcggaggacatagcttttaaatgactctataaaaataatggggagataaatatggattcaattaatatgtgctacgaaatgtgtgattatatagagcagaatggcattgtgaagctggcaggaaatacaaggctccgcgacaatcttaagaaggagtttctgcattttctaatatatatatcaatgatagatgaaaggtacggcgagcaggaaaaagcatttataaagaagaagctggggtttgaggtcagtgccttaatggcggctgatattaagaaccgcaacatgcttggagcaggctatattataaaaatgccagagacatttaagtattttatacttgccaatgcaggccacaagattaagaacgacagatacgacaacaaagaggcgcggacgctggcagaaagctacaggaagcttggacaggaatatctggctgcgaatactgaaagcaccgaggtcgagataaatgttttatcatcatactgcgtgatgctggacgagaaccttaaagcctatggtctgctgcaacctgactacaaaagtgttgcaatacaggcagacgcaggcgaaaaagagcagagtgccgatgaacttatagcagagcttaattcacttacaggacttacagcggttaaagaggatgtcaacgcacttattaatcttcttaaagtccagaaaatgcgcgagcagatgggaatgaagcagacaagcgtcaacaaacaccttgtattcatgggaaatcccggaacaggaaagactacagttgcaaggctgcttgcaaaaatatataaagcaataggagcaatctcaaaaggacatcttgtggaggtagaccgttcaggacttgtgtgtggttacataggtcagacagcgacgaagactgcagaggtaatagaatcagcacttggaggagtcctgttcatagatgaagcttatacacttactaatggaaaaggccagggcgatttcggacaggaagctgtagacacattattaaaaggaatggaagaccacagagatgatttagttgtaatagtggcaggttatacagaactgatggaggaattcttagattccaatccgggactgcgttcaagatttaataaattcattaacttcgaggattatacagccgaggaagaggttgagatacttataaacaactgcaagaaacaggaatacatgttatcaagagatgcactcgaagaagccagaagattcttcacagagcgcgtagccaacaaaccagaaggctatgctaatgcgagggatgtaaggaactatctcgaaaaagccatatccaatcaggcaacaaggatagtcggacttaaggatgtggataagaatatactggcgatgcttgagaaagaggatctagtggggatagagttgtgacatacgggaggttgtggcagacggacgcggcgggcgggtggatagtgtcattttcagacacgctctcgcttggtggaaaacgcagctgtactaaattcgctggttagccgcataaaatgcggctcccagctcattaagtgcaggcgttttccaacggtctgaaactaacactatccacccgccaccgcttactccgcaagcgtctccagatgtcgctcgccgctccagatgtcgcaggctcatctggagagggagtggactttagcgtgtagggaaggcacaaggaagtccaaaaaggaagccgaagcgtggcagattggatgttgaagcggggagaaggtgagatgaagtccaaaagggaagccgaagcgtggcagattggacgttgaagcggggagagggcgtgatgaagtccaaaagggaagctgaagcgtggcggattggatgttgaagcggggagaaggcatgatgaagtccaaaaaggcaggagaggagaaatataatgggaacagtatattttacccgacatggacagactgtctggaatgtcgagaacaagatatgtggtgcaacagattcaccactcacagatttaggccatgaacaggcaatagagttaggaaagaagatacttgcagaaggaatacagatagatgaaatcctgtattcgccacttataagagcgaaagctacagcacttcatgtatctgagattacaggaataccagcgcgcgaagagataagacttaaggaacagaatttcggtaaatacgaatcaacaccaagagatggagaagaatttgcaaaagccaaatgcaactttatatgtagttttgatggaggagagacaatgcttcatcttgcacagcgtatatataatctgcttgatgatataaaggcacagcctgataaaacataccttttggttgcacataatggaattgcaagaatggtaaagtcctattttgaagatatgggaaatgaggagttttcggcgtttaagataaagaattgcgagatattgaagttcgagttgtgacatacgggaggttgtggcagacggacgctgtgggcgagggatagtgtcattttcagacacgctctcgctcggtggaaaacgcaactgtactaaattcactggtttgccgcataaaatgcggctcccagctcattaagtgcaggcgtttttcaacggtctgaaactaacactatccacgcgcccgccgcttacgttgccgcccctcacgatgttgcaggctcatcgggggacttccggaggggggtgtgaccgggacgggtgttgaatgaaggctcacctcaaaatttttgcagacccaggtgagcgaagcgatatcgtcaggtgttagtttcgggattgtaagaggcagggagagagccagccgggttaattgtgtatatttcctggagcagaccgttggaaaacgttggcacttaacgaggcgagggagccgcctttggcggctgccacgggcgagtttagtaccgctacgtttttcatcgagcgggagcgggtctgcggaaggaaatatgccaattaacccggcgtccgttctcccttccccctctcataatcaccaaaactaaaacacaataccccctagaccgcatcatttctttgagctataatcaaacccggctgggaaagccaatgaattgtatagggaaagaaaggcagtaatatgtttaacaaatcatacattaaaaaggctgcagcgatagcagcagtaatacttgcggcaacagcacttccggttaatatggcaaatgcagatacacagacaacagaaagcactgtgacaggaagcactgtaacaggaagtacagcaaatcagacaacatcagaatacacagaaatccgaacagcgtcagaacttgtggaagcagctaagagtgcgtcaggaaattataaactgatgacagatatagatatgacaggagttgagtggacgccatgggatttttcgggaacatttgacggtaacggacacagcatacttaacctgtcagtaaagacagtaagcaagaagacaatgaagacctatgacggcaacagaaaagagtacaaaacatacggcgcaggcttctttggtgtgcttacaggtgcgaaagtaacaggactggatatatatggagcaagaattgagattactacaacggaaccatgttttgcggcaccaatagcagggcttgcagacgacagcgacatatcagactgtataattaaggatacatatgtgtcactaacagattcagctaagatgtggggaacaggcggaattgccggatttggaagcggcaatcttgataacatcactacagatgtaacacttgtctgcgttgatacagatgcagcggtcagggacgagcagtttatgggtggtgcttacgcagccggctttcttaatataagaaattgttctataacaatagacggatatgattcggaccacggatatgtacatgatggcggacttgtaggaatgtatatggtatatccgttagagctgtcaaagacatatcagggcgaagtgcttaacaacaaagttaagggaatgataacatttttcgaagacaatacagaccgccgtgcatactgtcaggcaaatatgggtgaggtcatgaactggacatatgcatattcaggcttcacgtcagattttaagagaaatgagacatatgattattcagtgacactgcttccggaaatgtgcagcaatccttcatacacagatgtagtgacagaagcaacagcatcagactttggatacacaacacacacctgcagtacatgtggctacacatattcagacacttacaaaatacatgagcataaggttgacaattacagtgttgtaaaggaagcagccagcacagacaagaaagacggaatagaggcaggaacatgcagcctgtgcaatcagacagtttacagggaatatgctgcaaatgtagtaacagacgataatacacaggcaacagacaataaagcatcaggcacggctgtcaaaaaaggaatgaaagaaagtacagcagtatttgcagtaatattggtggtaatagttattgtaataattataacagtagtcatgatggtacagaataataaaagaaaaagaagatataacagacgcagatagaagggagcagttatggaagagaacacatttataaatgtatcaaaagatatgatgtcattcatagaaaaaagtcctacagcatttcaggtaacggcgaattttatggatttgatggacgacgccggatttgtgcgccttaatgagagggacagatggcatcttataccgggtggcaaatactatgtaacaagaaatgattcttccataatagctttcagaatgccggcggcagagggctttatcaattatcagattgcagccgcacacagtgattcaccgtcatttaaggtaaaagagaatcctgagctgacaccggacaagaattacgtttcgttaaatgtggaaaaatacggcggcatgcttatggcaccgtggtttgaccggcctctttcagttgcaggaagggcaatagtaagggaaggtgcagtattaaagccagtccttgtaaatgtagacagggatttatgcataattcctaatcttgcaattcacatgaacagggaagccaacacagggcttaattacaatgcacagaaggatatgattccgcttataggagaggcagaatcaaaagggctttttgacagtataatagctgatgcagcacagacagataaagagtcagtgataagcagtgatttgtttgtgtacaacagacaggcaggaactatatggggtgcagacaatgaatttatatcagcaccaagacttgatgatgtgatgtgtgcatattcatgcatgaatgcgcttatagacagtgatgagagcaaccaggaaagcgttgcggtatgtgcggtatttgacaatgaagaggttggcagcagcaccaagcagggagcagattcaacatttttatcagatgtgcttatgcgtatagctgcgtgtgccggcaaggataatgaggattatataagggcgtgtgcaggttctttcatgctttcagcggacaatgcgcatgcggttcatcctaattatcaggagaaagctgatccgactaacagacctcatatgaacaaaggtatagtcatcaaatacaatgccaaccagaaatacacaacagatgcggtttctgcggcaatatttaaagaaatatgtacaagagcgggagttccgacacaggaatttgctaaccgttcagatattccgggtggttcaacacttggaaatatagctaactgccatgtgtcaatgaacacagtagatatcgggcttgcgcagcttgcaatgcactcaccttacgagacagcaggaattatggacacagaatacatgataaaggcagtaaaagaatttttcgagacagccattgtgactaacagcaacggcacatttacattagaataacagaaagatacagtatatgagcaatactatatatatggccccgatggaggggcttacagattttacataccgtaatgcctatgagaaaacatttggaaaaggcagaattacaaaatattttacaccgtttatctcacctaataagtcagagaattttctggcaagagagctgcgtgacatagaccgtgagcataataaagaaacatatacggttgtacaggtgatgaccaatgaagctaaggattttatatggactgcgaaaatgctttatgaaaaatacggctacagcgagattaatcttaatgccggctgtccgtcaggcacagttgtttcaaaggataaaggctcaggaatgcttcgcgacacagaaaagctcgaccgttttcttgatgaggtgtttgaggatgcatttataagagagaatattaaggtttcggtcaagacacgaatcggtgttgaagatgatgacagttttccacagataatggaggtgtataattcttatcctcttgaggaacttattgttcatccgagagtgcgtacagattactacagaaatgagctgcatcttgacgctttccgatacgcagtggataacagcaggaataaattggtgcttaacggagatatatttacaaggaagaatttccttgagatgaaggagatgtttccggaggttgatacatttatgcttggaagagtgcttatcgcggaccccggactgattaatgtattaacagatgataatcctgaggcgatggtgcgagaccttaatgcagataagaagctgatgaaagagcttcacgaccttgtatacgcagcccgcacagccataatgccgggagatacacatgccatacacagaatgaaagaaatgtggtgttatatggaatatgtgtttgatgattgcaaaaaagaaatcaaggcaatcaagaaatcccagcgtatggctgattacagggcggaagttgatgtgttctttaatagggcagtgcttgccgaaagaaaaaatataatattttcaaagaaattctaaattagtgacaggcaatattatatcagatattgtctgttttctttttctgctgatgtccagtcatgtaagcgagaagttgtcttggcaggaatttgctgccaaaaacgccggctttcattgtaaatgtcggaacaatcgtaagttttcctgtaaacattttacagagtgcataataagcacagtagtcagcaggaattcctgatagtgcgaacttgacattagcgacattgttaaagttagtatcaacagggcctggacagagcatacttatgtgtacattgctctttaagtcgcgcagttccccgtggattgcagtagtgaggcttgtcacataagccttggttgcataataggtagacatatatggtccgccaggaagcagcccggcacttgatgccacattcatgatgtagcccctgtcacgttgtataaagcccggaagtacggcctttgtaagtatatgcacagctttaatattaacattaatcatgttgatatcattctttaatttcgtttcagcaaatgtgccaagttctccgaatccggcattattaatcataatatcaagtggatatttgcggagttttttgccaagctttacacatgatttttcatcagataaatcacatgtgatacatttgcacctgacagctacattatcagcaatttcatgaagcgccgctgagtttcttccaacaagaatcaggtcatattcaaggtctgaaagcagatatgcaaattcttttccgatgccggaagatgctccggtaatacaagcaagtttcataagaagactcctttctttttgcaggcaagtgaatggtgtagttatttcgaaaacgatgtactggttttcatgtctttgtctttaggctatccatacatttttctgttttctgatttcacagacatttatctgtgaaatacttgcgcagtattgtcagagaatattgaaaaaacctataagaagatattatttcttttgtttataggcagaaatagtatgattcctgctcataaagcgcagatttcattgtaaatacctatagatgacataaaactgtgttgtttataggtatttttcagctttctggcaaggataatgtctgatgaaatagaaaaaagtgtaggaagtacctataagctgtcataatatacgactatctataggtatcatgacaaaaaaatcataccatacaattcttcatcaataataatatgcctataaatcttgaaacatagatatccttataggaaatgtataacagcattatagcagattcatccaatatatgctacaaaaccagagccggcacccagtcacaatataacattgacacacttccccgccgggcttaaaattattgtttagataaagcctgctgatagggcatgcaaatgtggggttacacagggaggaattgatgacaataaagaatgaaacagcattcacaaaggaatgtatggaaggtgccatgcgtgccagtaattttgataacagcagatataagacttttaagctgatttacaatatgtttggacttatattcggaatgatgatgataagagagcttgttcttaagatgacaggaaatgagcaggctgatacatttatgatagtgctgtttggtttagtggcggtagtatttctgtatataggaatgattggaatggataagagcaataagaagaaattccataatatatatggaaagatggtaggaattaaattctcatatgagatagatgcagagaatattattattacagatgaagaaaacgacagtgatacattcagttggaatgatattgtgaaatggaatcaggatcctgataatatatatctgtttgttggggatgataactgcctggttgtaagcaagaaagggtttactcagggaagtgcagatgatctgaggcagcttgctgatgctgtaattggtatgagaaatgtgacaggaaacagccagcagtaaattgacaaacactattagtagcagatataatatcttcatctgcgtttagctatgcgggaaataatcaggaggaggaaagccatgaacaatcaggaaatgatggaactttcaacagtagataagagcgattttgaggaacttgtaaaagagtgtacagcctcaggtataatcgatcagaatctgtatacagagtatgatgtaaagagaggtcttcgtgacagcaatggtaacggcgtacttacaggtctcacagagatatcagatgtattaggtaaccagagtgttcacggaagaaagatacctgtagacggagaattatattttcagggatataatgttgaggagcttatcaagagaagcagccttgacagattcagatttgaggaagcaacatatcttctgttattcggagtacttccagacaaggatcagttagacagattcataagaatcttaacagatcttcaggaactttctggagcattcatcagagatgttattatgaaagctacaagtactaatcttatgaattcgcttatgaagagtatcttaagtctttattcatatgatgagaagccggatgatatttcaattcctaatgtattaagacagagtcttcagcttatagctaagatgcctcttctttcagtatatgcttatcagtcatacagacattttaagcttgatggaacacttatgataaagaatcctaagaaaggttattcaacagccgagaatattctctatatgttaagagatgacggagactttacagaacttgaagcaaaggtacttgatatctgtcttgttcttcatgcagagcatggtggtggtaataactcaacatttacaactcatgttgttacttcatcaggaacagatacatattcagcaattgcttcatcaatcgcatcccttaaaggacctaagcatggtggtgctaacttaaaggttcaggaaatgtttacagatattaaggcacattgcagcgattgggacaataaagatgagatatgtacatatcttaacaagatccttgacaaagaagcatttgaccatgcaggacttatctatggtatgggtcatgcggtatatactaactcagatcctagagcagttattcttaagaaatttgcgaaacagctttcagaagagaagggaatgcagaaagaatttgcattatatgaacttgttgaaagcgaggcaggacagcttatcatgaacaagagaaagatgtttaagccagtctgtgccaatgtcgatttctatagcggatttgtatacacaatgcttggtattccagaagaaatgtttacaccaatgtttgcaacttctagaatttcaggctggtgtgcacacagacttgaggaacttgttaatgcaggaaagattatccgtcctgcatacaaatatgttggacatcacagaccatatgttgatatggacgagagataattacgtttaatggagtagtaaaattatgtcacagtacaaggttaagaagctggaccacccgattcactgtacagttgaagtgcctggttcaaagagtattactaacagagcgctgcttatggcagctttatcacagggtgaatgtacccttaaaggagttttgttcagtgacgattcgagacattttcttttaagtcttatcgcacttggatatattatcgaagtaaacgaagttgaacgatatgttatcattcatggacatggaagagatattccaaagaagagagcaacaatcaatgtaggaagtgccggaacagcggcaagattccttacagccatgcttgcgttatcagatggtgagtacacaattgaagcttctgaacagatgaagaaaagacctatgcttccgctttttgaagcattacagagtatgggagcagagattgagtttcttgagaaagacggacatcttccagttaatgtaaaaggtgcagcgtatggtgggaagaaaccacagaatcatgtttcaataagtataagtgaaagcacacagttcttaagcgcacttatgatgacatctccgatgcttgaagaaggaatacatgttcatattacaagtaataaaacagaaggatcatatgtgcgtataacagctaagatgatggaacagtttggatgtgtggtagaccataaaggggcagaatatgtagttcctgagggttcgggttactatccacagacatattatattgaaccggatgtttcagcagcctgctacttctatgcggcagcagcacttacaggcggaacagctatcgttaagggagtacattctaactcaatgcagggtgaccttaagttcatagatgtgcttaagcagatgggctgtgctgtgacagaggaacgcgagggtatatgtgtcagcggacctaaggatggagaatattgcggtgtggatgttgatatgaatgatttctcagaccagtcaatgacacttgcggctattgctccatttgcaaagactactacagttatcaagaatattgaacatatacgattacaggaatcagacagaattgaggctatggtcaacgagcttaacaatcttggtgttgacgtcaaagagggaagagaccgtatagagatatctccagccaatgttaagccaggtgttgttgacacatataatgaccacagaatggcaatgtcatttgcattaatcggattgcgtgttgatggcataataatagataattacgagtgctgttgtaagacatttgagaattattttgaagtacttgaaaaggcatgtgcacaatgaaaatacttttatacagatggaaggtgttcaatcaggatgatgtaaagtctgcgattgaatatttcggacatgaagtacatgattacacagaaacagtaatagacaaggatgatgagaccggctttaagctccgtgactatgcggagcttaggcaggtcttttctgcatacgactgtgttttttcacttaattattttccacatgtatcggatttatgtgaagagcttggaaaaaaatatattgcatggacggtagatagtccgcttatatcactgtatcatcaatctttatttaataaatgtaactatatatttatatttgacagattttattgtgaggaactaaaaaatcttggggcagaacatgtgtggtatcttccgcttgctgtaaactgttcccgtgttggtaagataataggttcgcttactgctgatgaacggaacaaatggcacagtgaagtatcatttgtcggaggaatgtatcacaggaattcttatgatgaaataaaggataggttgccggaatatttaagagggtattttgatgcggcaatggcagcacagatggaaatctatggtgacagcatatttgataaagtgcttacagttgatatacttgaaaagttatgtgagcttatagattttaagcaggatgaaagagcattttcagatattgcacttgtgttttcatcaacatttttaggtttcaaacttgctaatatagagagggtgcagatacttaacaagcttgcaaaacattttccaacagacctctatacggatgatccggataaggagcttataggagttaatcttaagggtgcagttaattatatgacagatatgcctaaggtgtttaattgtagcaggattaatattaatcctgtaatgcgcaatatccgtactggaattccgcttcgggcgtgggatattgtcggtgcaggcggatttcttatgaccagttttcagcttgaatatatggattttttcgagaatggaaaagattatgtgtattacgaaagccatgatgacctgttaagaaagacagaatattatcttaatcatgaggatgagcgtgcgcagattgcaagaaacggacatgaaaaagcagtgaagtttcattcatatgaaaagagaatggagttcatacttgataaatgtggtatgttaaagcactaaagttcaattttagcagtttactatattgaaatgtgcatatatgaccattgttgaaaataaatatatatggtattataaaaaaaggttgagacaacaaccatacaatattataacttttactttcaggagggaaaagaaatgagtttttgcaagtattgcggaagacagttacaggacggagaagtctgtacatgtcagcaggcacaacagtcagccggagcagcacagcctcagcaggaatttaaccagcaggcagcgcagcagacattccagcagggagcaggtcagcagacatatcagcaggcacagcagggatttaatcagcagcaggcttcacagcagatggacgctgtgaagaaggcaggagctaatgcagcccttgattatgttaatgtattgaagggattgtttacatcaccagtagaaacggtatcagcatttgttgctaaagctaatgttattatgattgcaatacttattggtggtcaggcaattattaacatgcttacaagattatttgatatgttaattgctaacagtaaggcaaaggttacaacaggaagtaaagagcttgacagcttactttcatcttactacagctcatatactaataccaagccatatccagcaggctcaatattcaagaacatgcttcttgagattcttctggtagcagtagcggcagctgtaattgcacttgtagttatgcttcttgcaaaggcatttaacaaggctaatgttacatatatgcagggccttgcagtatatgccattacagcagtacttggtataccagcagagttactcagctgggtaacaggtcttacatcagtaggattcattgacagaatatcttcatgcgtaacagtattttctaatgtagcaggatatgcatttgtatacatagcaatccgtgcattatgcaaggatgagaagaagatacctctaataatggcaatctcatatgttgcagttaatttccttacatgggtattaagacttatgttctaattaacaatttgataattgattataattaatgattcccggcagaccggaagtgtgaatacacaatggtctgccgggaattttttattatttttcaactttttacaaatgtatttcgtatataagtgtaagagaacttatatcaaggaggtacttatggggagaagaaaatgtttaattattccggtccttatggcaggaatattattaatgggaggctgcagcagacagagcattgaagatgtgaagcgttttcaggagacaagcaaagccgtagagaatcagaccaatcagacaggaattattcaggagaacgaatcacgtgagaacaaagttgataatgtgtttgcgggaatggtttcaagtagtcctaaatatgctgaaagatattcagatgttgatatggagatttatacagggaaactggttaccaaatttacatacagtataggtgaaacagccattgctgaaaatgttgatgagttatccaagctgatgagcgaggaggacatagctgaatatataaaatatgatactgaaacaccagaaaaattcagtgcatatgacaagatgattaatgaagatggaacatttgcaaatgatagaaaaggtatcaagcaggttgccctgctgatgaagttaaagattactaataatggtgatgaagattttcggtttctgtcgaacggattccgtttgtattgcttcagatataacgaacaggacgatgcaacatattattcaaccatagaaagcagacaatcatatcttaatattcatgatgaccatgaaatattcagacatcatcttacaattaagccgggagaaactaaagaggttgttgcaatggaggtcattccttatgaatttgttacttcttacacaagaacaactgctaatgttggaggtcaatatatagatacatataaggatataacaacagatggtcttactatagattcgttgtatacatgctacagtacaactgataaagcatttcctgttgggtctccgatagtaaagcttgatatagacaagtagccgggaggaaaacagtatgaaggtgatgattaagacagagctcgaaagggcatttaaaagctggagtctgtggctggctcttataattgggatggggttaagcatagcacagattataaccaggattataccggcagccatgaatccgctgatgggatatatgcctgataatgccacacttatgccgataagtgcatttcaggtgtggataggtaatggagtatcatttgaatacagtctgtttataaggctgattccgatactggcggctatgccgtatgcagttacatatctgtcagatattaaaagtggaattattaagaattatgtaacgagaacagctaagtttaattatcttgctgccaaatatattgcagtgtttgtgacgggaggtgtggtagtggttatgccattgcttattaattacctgactgcgataactattcttccatcacttgtgtggccggttggtgtatttgcaagttctccaaaaagtatatggtcagcaatattttatacacatccacacatttatatgattatgtatatgattctgctttttgtgtgcggaggtcttatggcaacaatagcacttattgtatctaatatagttaataacagatttgtggctatgcttgcaccatatattattactgaatttgcaaatgcgatactgcgcatgtctgataagaaatggctgagaggtattgcaccgacaaagctttttaatatggcacagaccaatacaggagcatcgttcatagtgtatatagcagtattactgatacttggagttgttgtgtattttataggagggcttaagcatgaaacatactaaaggcagattcagcataagaaagcacccgtttataattacatttataataatggcagtaattgctgtagtagttgcagttggatatatagatgtgaatcacagatttccagagccggaagaagaaattgtagagaaggatgaatgggtacagtattctgatgggataaagattacggttacaggaattgattactgcactgaacgggaagttaatgaaaaatacagcgccagtgttaaggaactgggcaggtttaattatatagttttaaaggttaaagttcagaatgagtcacaggataagtttaatatgttcagtattgtgacagactctaatcttgttatatacccggatggatatgaaaatcagggaatggtatgtgaagataatgtatctgttgataaaggcgaggtcaaagactttacactggcatatgtcattagtaaaaattatctgagtgaaaagaagctggataagctccttcatgaagatatatatctgtgttttaaggcttatccagtaagacaggcgattgtaatcaggggtatagatggatgaagaaattaaaattattatttaatgtaagcgaggctacacttacggcggctgtgtttgtgttagtaacagcgcttgtaccgatggatataattctaaaacttgtgagtcagtccgttattaatggaaatccgtgcctgtatgatgcacttatcagtgtgaatgtaagtacaatgtggagatatgttgttccatttgtattgttttatgttctttatattcagaaatatgatttgaacagtgcaatagttataagaagaaagaatgtaagaaatgtgtggattaattcacagattaatatggttgtggcagcaggatttttctctgcgtatattacggtggtaactttaacagccgggtatctgatgacagggaaagtatataactgggatgaaaaattcagcaaggcattcatggcaacaggagatatagtacagaaccgcccatcactgtggctttttataattgcatttgttatagaagcatttgcaatactgtatgtatcaggcacgcttatgatgattatgtggtggcttactaataaccagtgggcaggtttccttgctgccctggctgtgagcagctttgagaacatggcgtatatgggatttcttacatattattacaagttaagaggcaatatctatatgaacggtgtgcagatatggcggaatatattgtatccgctgatactgtgtctggctgtgtcactggtaacaactgttattatcagaagaaaggactttttcagatgaaaaatgtgatttttcagataaaatatgatttcattaatggaatagtgcatcagtggaagaaatttcttctaattgcagtggtatatgctgttcttataacagactttcttgtgcgctgtaagacaaaacattttatgggacaatacacatcatcggatatcatattatatatctttcgcgggatgcgctggattgtggatgtacagacagatattaatattccgacagcatacatacttcctaatattcttattggctttgcaataggtaactatccattcaaggatattaacggttatggcggaatggtgcttatgagagcaggtaagaagctggtatggtggttatccaaatgtatatgggcagtgtttactgcatgtatctgttatggaatcttaatacttgagatagccggtgtttcgctggcaggcggaagactgagcctgcaggtcaataaacaggtgtgtatcagtatagacggttacgacaaaacactgataaagaataatccgaatcttacaagacttacagtgtatatgattattgtggggcttctcacaacaattgcaatatgccttgtacagatatgcgtttcacagattatgggaccgattatcgggtacattgctgtcgtagttatactgattatgggagtatttttcaggtcattcctgtttataggtaacggcttcatggcgttaagaaatattatgtatacacccgaaggcgggagccttacgctgacggttattgcagatattgtgctgatagtcgtttctgtaattgcaggatatgcttcgtttaggcaaatggatatattaaagaaaagtgattggagggtgtaattatggtaataaagcttacaaatgtttcaaaggttataaagaaggcaaaggttcttgataatgttaatctggaacttacaagcggtaaagtgtatggcttaaagggaaagaatggctcaggaaagacaatgcttatgagggttatatgcggtcttatatcagcaacagagggaactgttgagatagatggcaagattcttggaaaggatatgacatttccggacagtgtcggagtgctaatagagaatcccgcatttatcggtaattatacaggttttaagaatcttaaggtgcttgcttcaatccagaacagagttgatgatgaacatataagagaggtaatacgtcaggtggggcttgaccctgatgataagagaacttacaggaagtattctcttggtatgaagcagaagcttggaattgctgcagcatacatggagaatcctgaccttatcatacttgatgagcctatcaacgcacttgatgaagcaggagcaaagcaggttcatgagatacttgaggaacagaagaagagaggcgcacttatcataattgcatgccacgataaggaagaacttgagatgctctctgacgagataattgagattagtgaaggaagaatcatagaaaagtaaaggaaaagggcagtcatacaggtgagtgtgaccgccctttgatatctaaatgcttaatttaccgctgaatactccatcgtattcattaaaataactctcttcaagctttctcatcataactgtaacataatcatcaatatagcttaatgatatatacatattgccgacggaactatcaataatctgcactttgataagaagattattgtctgctctgaaagctgcgcttgcaccacatttgaaattataatcagggaagttctggaaaacattctttccgagtccgaaatgcagctcgtgatttcctgttgcattagtatagaaaaatgttccttcatccccgttaaatgtgagctttatgtctgttacaccacatggattagtgtcaaattcatagctctgtccgttgattttgcttataaggtctgaactatattcgcccggttcaacaagaagctggcgtgaattttcgaatttctggaattctttataatcaccattatcagtacatgtatcaatatggctgtatacttcttcgtaaaatgtatcatatatcagctgtactccaccctgacgaccctgtgcatcagcagtggtaacaagaataacatctttatccgggtaatatacggcaagctgtccacccataccaaaaaatgcataaccattgtgagttgtcatccatatctggtagccatagccctgcatttcttcccatgaacctgattttccataagggtcactctgcttaacagttgcctccttaagatatccggaaggcagcaactgctttccatcaagtttaccattctgagatacaacatacataaccttaaggatatcccgtggtgttgcacacattcctgaaccgcccatgcttacttttccatcaggagattttaatataaatgcttctttagaaaaactcaattcgtctaagaatttcgtcctcagataatcaagcagttccatacctgtgagcttttcaacaagtgcacccaatgtatgtgttgaagctgtatcataagagaaattagttccaggaacatggtcgggtgtaacagtgaagaaagaacctacccagtcaggggaacctccgattttgtatgcattcacatcatggcatgttctcattgtgagcatctgccttattgtgagcatctgcatatacgggtgtacgcctgtttctggctgcttttcagggaaataatctgcaatatggtcatcaagtgatattctgccttcatcagcaagcagccctatggcaagtgaaacgaaagatttggtgacagaaaacattctgtgaagagtgtctttcgtgtatggtgcatagtagctttccatacatattttaccatgtcgcataacaattatgctgtgcatcggaaggttgttatattcaagctttctggcaaagctgataagtcctgtggaagatattcctacatcctctggtattaccttttcaaagtctaacattgttgtcctcctggatatttgtaatgattaaatacaataatcattcctattataatccttttgggtatatactgtaaatcaaaaaatatgaatctttaaattaagtccaatatagtatatacttaatgtaaatatgccagagggcatgaaggagaaggaaatgatagatttattacttaagaggtttgtaaaagattatgataagacgaagaaccccgaagtccgtacaagatacggtgtgtttgccgggattgtgggaataatctgtaatcttatactgtttttagcaaagatacttgcaggagtgcttacggcatcggtttcaataatggcggatgcggtcaataatttatcggatgcaggatcttcaattgttacacttataggctttaagcttgctggaaagccggctgattatgaacatccgtatggtcatggaagaatcgaatatatatcgggcttcatagtatcaggagcaattataattatgggctttgaactgctgacaacatcattcagaaaaatacttcatcctacgccgcttgaggtatccgtaccatctcttattatacttgtgttatcaatccttatgaaaatgtggatggcaaaattcaacaaatatcttggcaataaagtagattctgcagcaatgaaggcaacggctacagacagcctgtcagactgcgttgcaacatcagtagtccttataggagtgcttcttaccctgttttctgatattaatatagatggaatagcaggagttgttgttgctgtatttgtaatattagctggttttggtgcggcaaaagatacattgcagccacttcttgggcagccaccaacgaaagaatttgtacaggaacttgagaatattgttcttcaggataagcatataataggagttcacgacctgattgtgcataattacggtccgggcagagtatatgcatcgcttcacgcagaggttccggctaatatggacatgatggaagcgcatgattatatagatatggctgaaagaagagttgaaaagcgcatgaaatgctttataagcatacatatggatccggtagttacagatgatgaggtgataaatcatttgcgaaagatgactattgcggttgtaaagtcagtaggtgaggaactggatatacatgatttcaggactgttaaaggtccatatataactaatcttatatttgatgtgcttgttccttataattatcatctttcagatgatgagataaagaaacagattcagaaaaaaatcacggagaagcagagtgaatgccgcgccgtgattaatattgataaaagttatacaggctgattaaatccagccgccatcaagagttattatctgaccggtaagatagctgttcatgccggaaagagatttaacaagctcagcgacttcctgcgggtctccaaaccggcctgcaggaatctcttcggcaagggaagccttgtcatcatctgagagatgaccgttcatatctgtgtcaatagctccgcaggcaacagcgttgacctgaataccacttggagcaagctcctttgcaagtgcccttgtaaatgaattgactgcccccttggttgctgaatatgcaacctcacagcttgcaccgtacaatccccacacagaagatatattaataatcttgccacagtgtcttttcatcatatctttaacggcaaaatggcagcagttaaagacagaatctatattagtgttacatattctgtgccactcatcttcactcatatcctgaaaaagcccgacaacggatattccggcattgttgataagcacatcaacctgcccgaaacgctgaaggcacatgtcaaacattttctgtacatcactgtaatttcccatattgcctgcaaatgtttcacattcacttcctttttcctcaataatggattttacttcatttagtttatccacattattcacacagttaataacaatattagtatcttttccagcgagttctattgcaatggctcttccgattcctcgggaagctcctgttataactatagtttttttcatgataatatgcctctcttaaaacgatttgattttaataatatcgttattataatacaggaaaacactggatatttccatataaaaattaaaaacatatattgacaaaaactgccttgtgcatacttaccaaaaagaaattcagattgtatttatttcaataattgcttgacaggatttgaaaatgccttaaaaagttttccacatttttaaagactgattttatctaaaataagacttatcaaccaagttatccacattatccacaattatccacaatattttgttattaatttagtatacctggaacagaataaatgttttgttaatatttgcaaaaaatcagaaaacttacttatgacacttgacatatttgcataaaataattaaaggacatacttgttaatttacaaatatatgatataatacttacataaaataagtatacagaaatgtatcttaggtcgtgttagctgcatgtgtatatattctttcgacacatgtggtgatttaagaaggaagaatgtctgatagattttataaagagaaggttggaaaggaattacgatcagattcttacctctgcccacgattataaaacacgtaaaggagttggacatcatgagatttataattacaggaagaaatattgatataacagagggattaaagtcagcagtagaggagaagcttggaaagcttgacagattctttgcgccagagacagaagttaatgtaactttgagtgtggaaaaagaaagacagaagattgaggtaactattccggttaagggtaacatcataagaagcgagcaggtaagcagtgatatgtatgtatcaattgatcttgtcgaagaagttatcgaacgtcagttaaagaagtataagaataagattgttgacaagcagcagaacgcagcagcatttgcacaggaatttgtagagaaagattatgatgacgatgaggttaagattatcagaaccaagagattcggaatcaagccaatggatcctgaagaagcatgtgttcagatggagcttcttggacataatttctatgtgttctttaattcagagacagaggaagttaatgttgtttacaagagaaaaggcaacacatatggtttgattgaaccagaacttgattagtatgcttttttacgtcatataggtttatcctctttttcagagtaccgtctgccggttagtgccggtaggcggtatttctctgtatgtataagaaatctatttataaaattttaatggtttaactttacttgatagaatatctaaatagtggtacaattacaacacaaataggcttttataaggagatatataaagtaatgggattagctcagaaattatttggaacacacagcgaacatgaattgaaaagaatatatccaattgctgataagattgagagttacagagaatcttatggcaagttaagcgacgaagaacttaaagggaagactaaggagtttaaggatagattagctaaaggagagactcttgatgatattctgccggaagcatttgcaacagtaagggaagcgggcaggagagttcttggtatggaacattatcgtgttcagcttatcggaggaattattcttcatcagggaagaattgccgagatgaagactggtgaaggtaagacacttgtgtgtacacttccagcatatcttaatgcacttactgaagagggcgtaatcgtagttactgttaatgattaccttgctaagcgagatgctgagcagatgggtatgatacatgaattcttaggccttaaggttggcgttgtattacacgactcaacaagagaagagaggcaggctgcatatggaagtgatattacatatgtaacgaacaacgaacttggttttgattatcttcgtgataacatggctatatataagagtgaacttgtattaagaaatcttaagtactgtattatagatgaggtcgattctgttcttattgatgaggcacgtacacctcttattatctcaggacagagcggaaaatctactaaattatatgaactctgtgatatacttgcaaggcaattacagcgaggcgaatataagggtgagagaactaagatgcaggcaatcatgaacgaggaagttgaagaagatggagacttcatcgttaatgagaaggataaggtagttaaccttactgaacagggtattcacaaggttgagcagttcttccatatagataattatgcagatcctgagaatcttgaaattcagcataatgttacacttgcacttcgcgctcataatcttatgttcagggataaggattatgttgttaaagatgatgaggtacttatagtagatgaatttacaggtcgtattatgccaggacgtcgttattcagatggtcttcatcaggcgatagaagccaaagagcatgttaaggttaagagagagagtaagactcttgcaactattacattccagaacttctttaataagtttgagaagaaggctggtatgacaggtacagctcttacagaagagaaggaattccgtgaaatctataacatggacgttgttgaagtgccaactaacaagcctgttataagagttgattataatgacgctgtatttaagactaagaaaggcaaatttaatgctgttgtacagtctgttattgaatctcatgaaaaaggacagcctgttcttgtcggtacaataacaattgagacgtctgagcttcttagtgagatgttaagaaagaagggcatacctcataatgtacttaatgcgaagtatcatgagttagaggcacagatagtatcagaggcaggacgtcatggtgcagttactattgctactaacatggctggtcgaggaactgatattaagcttgacgatgaggctgttgctgcaggtggtcttaagattattggtacagaaagacatgaaagccgtcgtattgataaccagttacgtggacgttctggacgacagggagatcctggtgaatcaagattctacatttctcttgaagatgatcttatgaggctgtttgcacaggaaagacttatgaatatattcaacagtcttggggtatctgaggatgagcagattgagcataagatgttaagcaaggctatagagacagctcagaagaagattgagactaataactttggtatcagaagccatcttcttgaatatgatcaggttatgaatgagcagagagagattatgtacgcagaacgtagaagagttcttgatggggaaagcatgcgtaattctatcatgaagatgataactgattatgtagagaatgtagttaaccgctgtgtaagtgaagataaagatgctaacgaatgggattatgatgagattaatgagcttcttcttccaactattcctattgagagagtggaatacagagagaatattaagaataagaatgaattaatacatgatcttaaggaaaaggctgttaaactctatgaggataaagaggcactcttcccagaggctgagcagataagagaaatcgagcgagtaatccttcttaaggtaattgacagaaagtggatggatcatatcgatgatatggatcagttaaagcaggggatcggtcttcaggcacttggacagagagatcctgttgtccagtataagatgatgggttatgacatgtttgatgagatgactgcaggaattacagaggataccgtaagacttcttatgcatattcaggttgagcagaaggttgaaagagaacaggttgccaaggtaacaggtactaataaggacgaaggaccatctgttaagggaccagcgagaagaacagagaagaagatatatcctaatgatccatgcccatgcggaagtggcaagaaatataagaattgctgcggaagacaggcataagtttataagagacatcagggcgcggaatgcttgaaatatcagcgtccgcgcctattattttggaggacatatggtagagttagaccagtttagatacagaatttcaggatacgataagcctatggctcagattaagaattctctggatcttgacaataagcagaaaaggattgaagaattagaggctgatatggaatctccgggattctgggataatccggataaatcacagaatgcaatgaaagagcttaaaggcttaaaggatgcatttgaaagatacaatgagctagaaacaggacttgatgatgttaagacacttattgagatggcagaagaatctaatgatcagtcgcttattccagagatagaagaagagataacgggtcttgaagacaagatggaaagtttaaggattgagacattgctttctggagaacatgatgcatgtgatgccattcttacacttcatgcgggagcaggtggaacagaaagctgtgactggtgtcagatgcttttcagaatgtatacaagatgggcggaaagtcacggatatacaacagaaacacttgattatcttgaaggtgaagaagcaggaattaagtcggttactatagagataagaggagagaatgcatatggacatctgaaatctgaacatggtgttcacagacttgtaagaatatctccattcaatgcggcaggtaagagacagacttctttcgtatcatgtgacgtaatgcctgatattaatcaggatatagatattgagattaatgatgatgatttaagaattgatacatatcgttcaagtggtgcaggtggacagcacattaataaaacgtcatcagcaatcagaattacacatcttccaacaggaattgttgtacagtgtcagaatgaaagatctcagcaccagaataaagataaagctatgcagatgttaaaggctaagctctatcttttaaaggaggctgagaatgcagagaatctatctggaatcagaggagatgtcaaggatattaatttcggaagccagataagaagttacgttcttcagccatatacaatggttaaggataacagaactaataaggaagttgctaatgcgggcagcgtacttgatggcaatatcgatccgtttatcaacgcgtatcttacatggataagcacaggaaagactgaagaataatgaaaggtggtatatcagtatggcagattacataaaaccagtaattttcagattagggaatcagcagtttggagtggatattaatcttgttcagtctatagaaagagagattaatattgtaagagttcccaatgcaatgaaatatataagtggaattgttaatctgagaggggaggttattcctgcattcagtttaagaaaaaagtttggcacagatgacaatgttggtgtgattggagaagacagtacagtaattgtaaatatacctggtgttgtcaagcttgctcttgaggttgatgaggtgcttgaaataggtgatattgatgcccagagcattgtacagatgccggcacttgcgaggactgttgatacagaatatcttgacagggttgccaatgttaatggacagcttgttattcttcttgatgttgaaaaattacttacgcagtcagaagcagagaatgttaagaaattcacagaagatatgaatgataatgacggaggtgctgctaatgtctgatactaagtttgagagaaatgcaggcatacttatgcctgtaagttcattaccatcaccatatggtataggaacatttggcaaggatgcatatgattttgttacatttgttaaagaatgtaatcataagtactggcaggtacttccgttaggaccaactacttatggtgacagcccatatcagtcatattctgcatttgcaggtaatccgtactttgttgatcttgatatgcttattgaggctggattcttgttaaagtcagaggttatttcaagagactggggtgatggaattgtgcctgtaaatgtttctgaagatgacgctgttaatggaagattcggaacctacagagatggaaatattggtgacgaaagatatgtcagttatgaaaagatatataataacagatttgacatattaaggattgcttataacagatttaaggctgcatgtgcagaaagcaagaagacgcttgcaaaggggcttcctctttataagcagtttgataattttgttaaagataatgcagactggcttgaggattatgctctgtttatggcattgaagtcacattttaacaatgtctcatggggtgaatgggaaactgacataaagttcagaaagcctgaggcaatgagccgatatgaagagcagctttctgatgatataggatactggaaattcatacagtttgaattctacttacagtggaatgcgcttaaacaatatgctaatagtaatggtatagagattataggtgatatacctatttatatgggatatgacagcgtagatgtatgggctaatcagggagaattccagctggatgagaatctaacaccaataaaggttgcaggtgtaccacctgatgcattctctgatgcgggacagaaatggggaaatcctctttatgattatgataaaatggaagcaaatggattcagctggtggagaaagagaatggcagcttcagcaaaactatatgatgtcataagaattgatcattttataggaattgtgaagtactatacaattccagcagacatgcctgatgcaagacagggtgagtacagacagggaccaggacagaagctgcttgatgctattaatgaatctatcggtgataagaagattattgctgaggacttaggtgttgaagttcctgaagtagcaaagattcttaaagaaaatggatatccgggaatgaaggttcttgaatttgcatttggtggagacagaaagaatccgcatctgccatataattatacacagaatcttgtatgctatggtggaactcatgataacgaaacgctgcttggtttctttgaggacagaggcgactgggagttaggatatgcttatgactatcttgatacaagagataagggaagaatggttgatcaggtgttcagggctgcgtattcaagtgttgctgttcttacagtatttgcagttcaggacattctcaaacttggaaattgggcaagaatgaatttgccatcaagcatgggtaataactggaaatggcgaatgcagaaaggacagttaggccagcacgaactggaatgcatgagatatcttgcaagcgtatttgatagagaaagaaagtaatattagatggggcagggaattatcaatatattttctgccccttttttgaagaaaaaacaaaaaacagtacgatagtactatttacatattcctgattagtggtataatattcatataaagagacaagttaatatattggcaaagtagtcgaaaggctatgacgcaaagccaagggtcttaactgattttatcagaatgacagccggttgcattacaatcaacgcaaatgattcgtattattcaggcatccggtaatcggatgtttttttattatatggttcaacgggggaactgattatgaaaaagaataattctaaaaagtggatcaaaacaataacaataacaacagcggtacttgtatttgcaactggtgcggtatttgcattaaagtcagcaggtacagctaatacagataaagatagtgctgatacagtagttgcggcagctaatgaagcaacagatttagtggttaaagaaacagtttcagagaaagaaacagaagttattacagagacagccgctacagaggcaacaacagaagaagccactgaggcagtaacagaacagagcagtacaattgcagagattcagccacagacagaggctgcaacagaagcagttcaggaaccagaagttacagaggctgttacagagttacctgttgtacagactccatcagatgcaagagttgcacaggttatagcaggaattaatgctgagcgtgaggcagctggtgtggcagcggttacatatgatgtgacactcacagatatggcacaggtaagagcatcagagaatgcagctaatgattactttgttatagagaatggtaagcataaaagaccagatggaagaaatgcttcttcaatatgtgaagattatggacagagtggaagcttcggcgaggttatgggaagatatcaggaaactcctgatgagatagtaactggctggcataattcagcaacacattatgcatgcatgacaagcagtaagtataacagagttggtgtgggtattgcagcagattcagaaggatatctttactgggtagcaatcttcatggattaattttaaatagacaatagattacataatatagatataacttaatatggtaagaacaatgtatttgcggcgttgtttttataaagcttcattagaagcgaaaaccctcacattcctctcccgttgtgtgagggtttctttttgcgctgaaattaaagaaaagacaggctccccttatttgttatatatctgggaaatgggacgaaccacggcaatgctgcaacatggttatagtatctgtgttgcttatgaaaagcagaaatgccagaagttagatgcaaaagtttatgtttggatagtatgtgatacctataggtagttgtatttttgaaacttttataggcagaaaaccacaataactataataatagacgataaataaacctatatatgaatggtaatgaaggtttttataggaaaatttctctaaaaacaggattttaggacgaaaaaacttatgaatatgcctataaagtacaaaattcctacggatttataggacaatgcttcctgagacaattaccaaactggaaactgccaaactgggaattatcaaaccagaaattgctaaattagaagtcagaaaagaaatcagaaaaaatttgatgagatatctgacaagatgttcaattgagcatttaaagagaaagatacttgcaatgtgtatacatatatggtaatattctttgtgcggtagacaattgtttatcagcgaaagacatctaaaaacaattgtctttgtaaaacggacaatagaaaggtacagacgcagtatggcagataatattaagtattatgtcgttaagcaaaaggctctgcctgaggttctgcttaaggtagcggagacgaacagaattattgagactgaaaatatatctgttgcagatgctacagagaaagttggaataagcagaagttcttattacaagtataaggatgatatttttccgtttagagagaatgtaaaggggaaaaccattacatttgtattgtctatggacgatgaaccagggctgctttccctggtattgaagaaggttgcagaattcaaggcgaatattcttactattcatcagacaattccggttaatgggattgcatcactgacgcttagtgtggatattcttccgactacaggagactcttcagaaatgatagagcagatagaaagacttaaaggggtaagatatcttaagatattaagcagtgatgcatctatctgatatataagcaattaaagaaaacggaggcagatatggcaaagattgcagtgttaggttatggaacagtaggatcaggagtggttgaggtattaaataccaatggtgcttcaattgcaaagagagcaggagatactattgaggttaagagtgtacttgatttaagagattttccgggagatccaattcaggataaaatcgttcatgatatagatcttataattaatgaccctgagatagaggttgttgttgaggttatgggtggtgtagagccagcatttacatttgttaagaaggcacttgaagcaggaaagagcgtgtgtacatctaataaggcacttgttgctgcacatggtcctgagcttcttgagatggctaaagaaagaagacttaatttcatgtttgaggcatcagtaggcggtggaattccaattatcagaccgcttaaccagtctttaacagcagatgagattactaagattacaggtattcttaatggaacaactaactatattcttactaagatgagcagagaaggaatctcatatcaggaggttcttaaagaggcacaggcactcggatatgcagaaagaaatccagaggctgatgttgaaggttacgatgcatgcagaaaaatagcaattctcacatcgcttgcatttggaaatacagtgaaatttgaggaagtgtatacagagggaataacaaagatttctaatgaagattttgcatatgctaaagagcttggaagtgttatcaagcttcttgcaacaagctacagtaaggatggcaaggtatatgcaatcacagcaccatttatgattgacagtacacatccattatataatgttaatgacgttcttaacggaatctatgtacatggcaatgtattaggagatgtaatgttcttcggagcaggagccggaaagcttccaacagcaagcgctgtagtatcagatgtagttgactgtgttaagcataagggtaaaaatgttatgacaatctggagttcagtaaagcaggaacttggtgatacatttgacgagacaagaaagttctttgtaagaattaagggcgatgatgtccaggcagctaaggcagcatttggtgaaggacaggttgttaaggttgatggaattaacggagagttcggatttgttacagaacctatgacagagagagcatttgaagatgctaaagataaggtttctgttataagcagaatcagaatagatgatactaaattacagtaataatataagggagaaaagtaatgattaaagtagttaaatttggtggaagttcacttgcaagcgcagagcagtttaagaaggttggcaatattatccgtgctgatgaggacagaaagtatgtggttccttcagcacctggaaagagatttccagaggatactaaggttactgatatgctttacaaatgttacgcagaggcagaagctggtaagaatattgagaagagtcttaaggcaatagaggaaagatacaatgaaattatcaagggactgggacttaagctttcattaaaggaacagttcgagacaattaagaagaattttgaggcacttgcaggaaaagattatgcagcttcaagaggtgagtatcttaatggtattatcatggctaactatcttggatatgagttcatagatgctgctacagttatctgcttcgataaggatggagagtttgattcagaaaagactaatgcagtgtgtgaagcaaagtttgcaaatattgaaagagcagttgtacctggtttttatggagcaatgcctaacggaaaggttaagacattttcaagaggcggttctgatgtaacaggatcaatcgttgcaagagcacttaaggctgatatgtatgagaactggacagatgtatcaggcttccttgcagcagatccaagaattgtaaataatgcaaagccaatcaacgttattacatataaggaattaagagagctttcatacatgggtgcatcagtgcttcatgaatcagctatcttccctgtaagaaagggtggaattcctatcaatatcaagaatactaatgctccggaagataagggaacaatgattgttgagacaacatgtaatatgccggaatacacaattactggtattgcaggtaagaagggattcgttgcaatcagcattgacaaggatatgatgaattcagaaatcggattctgtagaaaggttctttcagtattcgaggataacggaatctcaatcgaacatatgccttcaggaattgatactatgacagtatttgttcatcaggatgaattcgtagagaaggaacagaaggttcttgcacagattcataaggcagttaatcctgactctgttgaacttgaagctaaccttgcacttattgcagtagttggacgtggaatgaagaacagtacgggtatagcaggtaatattttctcagcacttgcaaaagctaagattaatgttaaaatgatagatcagggatcttcagagcttaacatcatcattggtgtaagaaacagatactttgaggatgctattaagactatctatggagtattcgttccagaagaataataagtaaacagggggataagggatatgaaagaggcaaagaatgaattaatgcagtttgtcggcggcgtaataatgcttgttgttggattgtacatattgtcacagaaagtaatggtgtcttcatcatatggatttttttcattatggggtggcaggttctcatcaggtcttattatggtaccgttaataatcggagttgtatggatgtttgctacaggaggttcatttgtatctaaaatatttacagtactttcggtaatacttataatcgcttcgattattgcatcaacaagaatatggcttgtatctattacaatgtatgaatgggttcttatacttgttcttatatttggtggtgccggattggttgccaaggtgttatttgctaacaataagtcagaaaagtcaaaaaaagacaaaacagaaagtacaggcagttatacatcaagtatagatgatgaacttgataagatgaaaaagaatatgaagtaaatttctttccccgcacatgaggtgcggggattcttgcgtttatgcaactgttgataaactttgatgaaattgatataattaaatgtaatatgcgtatgaaaacggaggaagattaatggatatcgcaaagaagatagcggaagagctggaaattaaagtaacgcaggtagaagctgccgttaaacttatagatgaggggtgtacaattccttttattgcaagatacagaaaggaagttacaggagcgttaaatgatgaacagctccgtaatcttgacgagagattaaagtatttaagaaatcttgaagacagaaagacccaggttcttgcaagcattgaagagcagggaaagctcacagaagaacttaaggttgctattacagcagcagaaacaatggttcttgtagaagatctttacagaccatacaagcagaagagaagaacaagagcaacaattgcgaaagagaaaggtcttgaaccacttgcacagttcatatatgcacaggaagctacagaagatgtagaagtcaaggcagcagaatttatcagtggtgaagagggtaaggaagttgctacagcacaggatgcaatagcaggtgcattagatataattgcagaacagatatcagatgttgcagattacagaacatatatcagagacatcacaatgaaagaaggaaagcttgttgtaacagccaaagatgaaaaggctgagtctgtatacgagaattattatgattatagcgaggcactttcaacaattccgggacacagaattcttgcaattaacagaggagaggatgagaagtttcttactgttaaggtagaagcaccggaagagagaatattaagatatctcgagaagaatattcttaaagacaatgcatttacagcagaataccttaagaactgtatagcagatgcatatggaagacttattgcaccagctattgaaagagagataagaagcagccttacagagacagcagaggatggggcaatcaaagtttttggaaagaatcttgagcagcttcttcttcagccacctattgctggcaaggttgttcttggctgggatccggctttcagaacaggctgcaagcttgcagttgtagaccctacaggtaaggtgcttgcaactaaagttatatatcctacagaaccacacaataaggtggcagaatctaaggcagaggttaagaagcttatagataagtaccacgttaatcttatttcgtgtggtaacggaacagcttcaagagaatcagagaagattatttcagatatgatacatgagatgaatcttcctgttgattatgtaattactaacgaagcgggtgcttctgtatattcagcaagtaagcttgcaactgaggaatttcctgattttgatgttgcacagagaagtgcagtttcaatagcgagacgagttcaggatccattggcggagcttgtaaagattgatccgaaatcaattggagtaggtcagtatcagcatgatatgaaccagaagaagttagagaacacgcttacaggagttgttgaggacagcgttaataaggtcggagtagacttaaatactgcatcggcttcacttcttgagtatatttcaggtatatccaaggcagtagctaagaatatagttgaatacagagagactaacggaagattcactaacagaaaacagcttttaaaagttgcaaagcttggacctaaggcatttgaacagtgtgccggattcatgagaatctcagacggagataatccgctagacgcaacaagcgtacatccggaaagctatgaggcagcaactaagcttcttacacttttaggttatgatattaattcaataacatcaggagaacttataggacttaaaggcaaagttgaagattttgccaagatggcagatgaacttggaataggaacaatgacacttgaagatatcattaaagaacttgagaagcctggaagagacccaagagatgagatgcctaagccgatattaagaaaagatgtccttgatatgaaggatttaacaccgggcatgatacttaagggaacagtcagaaatgttatcgacttcggagcatttgttgatatcggagtacatcaggacggactagtacacatttcccagatgagcagcacaaagagagttgagcaccctcttgatgttgtaagtgtaggagatgtcgtagatgtaagggttatagatgttgatatcccgaaggcaagaatttcactttcaatgatacttgatgagaaagaagcagctaacagaaagtacactaaggataattccaataataagaataacagaaacaacggcaaaggaaacagacaggacagaaagcctaagaaggaaggtcttaacctttcaggtcttgctaagttcatgcattaataggagtactgtatggaagatagaattgaatttgacagcgtaattacagagaaagcacttaatgatttcaagatgtatcatgtttttcacaatgttgggggagtgtttggatatgtatttgcagcatttgcaatagttatgtgtgtgcttggcgtaatattcaaaatgtctcctaaatatatagtcatgatgggactttttggagtatttttcttcttttatccaattgttaatatgaggcttggaacaaagaagcagatgaaaacagttgcagcatttaaagagccgatgcattatagtgccggggaagacaagataattgtaagccagggagagatgtcagaagaacttgcatgggagcagatatacaagataagattcacaggaagcaatcttattctgtatctttcatctgtcagagccaatgtgcttacagttaacagtatgggtgaggcagcagttccttttgttaaaatgtgtcagaagaaattaaagccttttcaggttaaggttaatatggataagcttgctaaggctgtggcttaagtaagcagataggaataatatggttaaagaaacatttaacgctaaagaaacatttgaagcaggatatgagatgggtaagaaggctcttccggggcagatatactgtctaaatggagatttaggtgtcggaaaaacagtatttacgcagggctttgcgaaaggtcttggaatagaagagcctgtcaacagccctacatttacaattattcaggaataccatgaaggcagactgccattgtatcattttgatgtatacagaattggcgatgttgaagagatggatgagcttggatatgaggaatatttttattcagacggggtgtgccttattgaatggagcactcttatacaggagataattccagataatgcgatagagatagttatagaaaaagatcttgagaaaggctttgattacagaaaaataactatcgggcaggaggcagtatgagaatattagcgatagaaagttcagcagttacagcatcagttgcgattcttgaagatgatacactggtagctgaatacacaattaatcataagatgacacattcacagacacttcttccaatgatagatgagatattttcaatggttcagttaaagcctgatgatgttgatgttatagcagtatcaaagggaccgggttcgttcacgggcttaagaattggtgcagctacaggcaagggaattgcacttgcgcttgacaaaaagatggtggcagtaccgacacttgcggctatggcatataatttatatggagacagcagatatatatgccctgtaatggatgcaagaagaaagcatctgtacagtggaatatatacatttgacggtgacaggcttattacagtaagagatgttaatcttgagtcatatgatgagcttgcagaagaacttgcaggacttgatggacaggttgtattagtaggtgatggtgtggatgtcgcaggtgacgtccttaaagagcagcttggtgacaaatgtgttcttgcaccggctcatatcaagacacagagagctggttcagtagcacttttagcaaagcagatggcagataatggtaaatatacagatgctgatgagttaaagcctgattatctgcgcccttcacaggcagaaagagagaaagcacagcatgagtcttaaatatgtgataagaccgatgacggaagatgatacatttgcagtggaactgatagaacagggaatattctcgcttccatggtcgcagaaatcatttgcagatgcgtgcaggaatcaggacaatgtgtatctggtatgcgaggcagacggagtaatagcaggatattgtggtatgtggactgtgcttggagaaggcaatataaccaacatggcagtatcaccggattacaggcggtgcggcatagcacagatgcttatgcaatcaatggaaaagtatggtaatgacaagaatgttacatcatatttccttgaagtcagacagagcaatctgccagcaatagccctttatgaaaaaatggggtataagaatataggaataagaaaaagattttatgaaaaaccagttgaggacgcagtaataatgtctaaaattattgggtgaaataatagactgcataatatatattgatgtataataacagaaggaggtgcgattaatgcttgatgtatgtttactgggaaccagtggcatgcttcccctgccgggaagatggctgacatcgcttatgacacgttacaacggaagcagcctgatgatagattgcggggagggaacacagatagctgttaagcagaaaggatggagttttaatcctatagatgttatctgtttcacacattatcatgctgatcatataagtggtttgccggggcttttgctcacaataggtaattctgacagaaagaagcctttaactcttgtaggacctaaggggcttggcagggtagtttcttcactcagggtaatcgcaccagagctgccatttgaacttaggctgatagaacttaccaatcaacaggagcatttgtcaatatgtggatatgagatagatgcattcagggttaatcatgcggttatatgttatgggtattcgataagtattccaagaataggcaagtttgatgtagagaaggcaaaagaacttggaattccgtgcagtatgtggaataaactgcagcatggaacagcggttacaatagatgataaagaatatactccggatatggttatgggtgcggcaagaaagggacttaaagtaacatattgtacagatagcaggcctgtccagattatagcagataatgctaaggaatcagatcttttcatatgtgagggcatgtatggagaggatggtaaggaagctaaggcaaaggaatataagcatatgacattcacagaagcggcacagcttgcaaagaatgcagatgtcagggaaatgtggctgacacattatagtccttcgcttgtgagacctcaggattatgttgataaggcaagaaagatatttcctgcaacaatagcagctaatgatggaagaacagttgagttgaagtttgatgatgagggttagattatgaaaaaatacggaaggacgataattgtaatagcagtattggttgcgttgggactggggtattactattaccttgctaataaggatacagggaaagatgctactgatattgcggcagataccggtgaggtttctgtgcttatttcaaaagatattatggctaattatccggaatcacctaaggatgtagtcaatctgtatgcaagaataacgaaggcatattatgatacatcacttactgatgaacagattgaagcattaggaaagcaggcacgtatgatgtttgatgatgaattaaagaatacgcagacagatgcggatttctatgagaaactcaaggaagatataggcaattataattcaaccaaaacacgtataagttcatatgttatacagagtgcagccaaaactaagtattcaacattcaaagacaggcagtatgcatcaattgcattagtgtattatctgagacagggtgacaagcttatagattcaccaacaaaatttaccttaagaaaagatgatgatggacactggaagattcttttctgggagctaactgaaatagacagcgatacagaataataggagatataaaatgagcgaaaaagaggatgttcttattcttgcgatagaaagttcatgtgatgagacagcggcagcagtagtgaagaatggaagagaggtattgtcaaatgtaattaatacccagatagccatacatacagagtatggtggcgtagttcctgaaattgcgtcaagaaaacatatagaaaatattaaccctgtaataaggaaagcacttgaagatgcaggagtaacacttgatgatatagatgcaataggcgttacatatggccctggacttgtgggcgcgcttcttgtcggagttgcggaggctaaagcaatagcatttgcaaagaataaaccattagtaggggtacatcacatagaaggtcatatcagtgccaactatgttgagaataaagaactcgaacctccttttgttgcgcttgttgtttcgggaggacatacacaccttgttaaggtcaacaactatggcgagtatgaaatagttggaagaacaagagatgatgcggcaggagaagcatttgacaaggttgcaagggcaataggattgggatatccgggaggacctaagatagataagcttgcaaaggaaggtaatccggatgcaatagaatttccaagagcacatgttgatgatgctccttatgatttttcgtttagtggaataaaatcagcagtacttaattatattaattctgccaatatgcagggaaaagagataaacagggctgatgtagcagcgtcattccagaaggcggtagtagatgctcttgtttcacgggcagtaaggctggcaaaagaatgtggaatggataagcttgcaatagctggaggagttgcgtctaattcagcgcttcgggcagcaatacaggaagagtgtacaaagaataacatcagattctattcgccatcacctatattatgtacagataacgcagctatgataggagcggcggcatattatgaatatattaaaggagttcgtcatggctatgatttaaacgctatcccgaaccttaaattaggagaacgcatataatgaatacggctatagttcttgcgggtggaagtggcaggagaatgaatagtgatattccaaagcaatatatgatgcttaaaggaaaaccagtaatatactattcactgaaagcatttcaggataacctgcatatagatgatataatactggtaacatctgatcattacatagaatatgtaaaaaaaaatattttagatgatacacttgataaggtttcaaaagttatacagggcggcgtggaacgatatgattcagtatgggaaggactgaaatgtatcaaggaatccggatatgtattcatacatgatggtgcaagaccgtgtataagccagaagcttattaacgactgctatgaaactgttgttgaagatggggcgtgtatagcggcagtacctgttaaagatactattaagatagcagattcagaaggctatgcagcaaaaacaccagacaggaatacattgtggcagattcagacaccacaagtatttgagtatgatataataaaatctgcatatagcagtctgtatagaagcggcagatttaatggggtaacagatgatgcgatggtacttgaaagatttggagaacatcgtataaaactggtgtacagtgattatagaaatattaagatcacaacaccagaagatatgaatacagcagaaatgtttatagaaaatatattttaatagataattatattaaatgcagtataaggagacaggtatgagtggtttttcagttaaaagagttaatattgtgggtgcatttgcatcattatgggcgtttatatttgcattttttccgttttacagaatagagccgatggaagtacttatacagcaggcagggaagcaggctgaatcatatgctttaactaaaaatctggtgacatataatttttttggtgtgctgtgccttatgttgtctatagttgcatttggattatacatatggaatagttcacaacttgtaagagcggctgcgataatagtttcggtagcggattttataagtcttatgcttgcgcttatagttggcaattctgaaataaaagatatcaaatcaataattacatatgctgttcagtatagtggctctggaatgaaaaccagtatgtttgtaaagacatccgtagcatatggatttgtgcttgaaatattgatgatattaataatggcaggttcgtattggattaacgaatttgtttttaaaccatatgtaatgggagataagtctggtgctaaaattaatcctcttgaaggaatagtgggaactgcaaaagcaagctatgcaagacagttttcagaacatatacatatgaaaacgtctggtacagaagagggtaagaaacatcctgataatatacttgatgaaaaaaaataaaaaaacttttaaaaagctgttgacaaagtcacaccgtgatgataatataatcaagtcgctggtgcgacacaataaaatagctatggagaggtaccgaagtggtcataacggggcggtcttgaaaaccgtttgtcttcacgggcgcatgggttcgaatcccatcctctccgctaaagccgttcattaaatatgaatggctttttatttgccagaggtgcttatgagcataatgcacaagaagctgatgcaagtagtgctggtgaaaggacttgatatacaagatgttgtcactttgaaaaaatatgacaaaaaagtaaaaaagttcttgacaaacaagaatggcaatgatatcctaattaagctgtcggcgggaaatgctgataacacttaatgaagttctttgataactgaatagaaagacaaccttgaaattctttgagaattttaaaatgattcattaatgaatcttgcgagtatcgaaag

SEQ ID NO: 8510 - DNA, 39137 bp, Unknown
  gut microbiota DNA sequence
gaagaagttagagaagaagttagagaagaagttagagaagaagttaaatcggaagtcagagaagaagttaaatctatagtaattaatcaggttataaagaaagtaaagaaatcaaaaactctggagacaatagcctcagaactagaggaagaagaggcagatataaagccaatatacgatgcagtggtttcatctgcccctgattacgatgttaatgtaattaaagatagattagacaatatgtgaaaaagctatttcttcataaatgaaataaaatcaaatcttttatcaagccatctgcctacaagggcgatggcttttcccattgtaaatgcagcgacaaccgtaccgatgccaagccccttaatatgacctaatatcagtccggtaagacatgcagttacggcaaggcatataacatcaaaagaaatcttgatgcgtgaataggcaatgccagtgatatctgcaagttcacgagggaacaggtcggtagggataattggaagcttacatctgttagaaagagctatgccgagacttatcaggcagtagcttataataaagtacataactctgaatccgattgcagttgggagcattggaacccacatattgtgcatgtcgatgcattcaccaaatatgaacccgacaacgaatgaaaacagatatgacggtacgagcttcttacgcagaatcataagactgaggacaagaagtccctgaaacatatatgtaaatgtaccgagagtaatcttagggaaaacttcggaaaaagcgtatggaacgcttgaaattgccgatattccggtacctgaataaagcataagcacaactccaaggctgttgattataacagcaaatgcaagaataagctcacctctgagtgttgtcttaacattttcagaaacagaaccagcatttaaatctattgcactatcaattgaactcataaggaatcccctttctttttaataaagaacataatcacagtctctaagtgtagtttcattattaattaataacaaatgaataattttaatgaaattatagattttgtctatagaactgtttataattaatataataaatgtgctcaggaggctgtctatgaatatatataatcttagatatttcgttacacttgcaagaatccgccagtacacgaaggcggcagaagaattatgcattacacagccgagtcttagtcatgcaatttcacagatggaaaaggaacttggtgttaaactctttgaaaaaaacggacataagataactctgactcaattcggagaggagtttctttcttatgcagaaaagactcttgatgtgttagatgatggaatcgcttctattaaaagaagtgcaatgggaaatggaacgataagattaggacttgtaagaccattgggaataagctatgtccctcggatggcggcagcatttataaagaagaatccgaagcttgatatagattttacgtttcacacagatgttacgggcaggctgcttgacgatatgcagcttggaaagtatgatttgttgttctgttccaagccatcagaagaatatcaatttacggctgagcccgttatgaagcagagactggtgcttattactcccaaaggacatccgttggctaagaaaaaggaaagaaacattaatcttgcagagacagcagactatccatatgtatgttttgacaagaactctggaataagaagcatatttgatcaaatgttgaaaaaatcggacacaacagtaaagattgcatatgaaactgaggaggatcaggttattgccgggttggttgctaatggatttggaatagcggtagttccatatatggatatattggaaaaaatgtctgtagaaatatttgaaatcgagtcaccggaatatgaaagaagcttctatatggttaatgataatagtacatacatgtctcctgttgtagaggcattcaggaactttgttatagagaatacaagtgttttaaaggctttatagagattaatataattaatgaataaccggttatatcttaattaaatgacaaatttgtagaaaaattaacaggttttattgatatatttttgacaaattttaatgaaattattaaataaaaataaagtttgacagaattcaatgtaaaaaataacaaaaatgaacgctggtcataaacaattttttgttaaaaatgtacgattattaaaggagaaaatagtgtcaaacctaggcagaatctaggcttgacattattttttttgtggaataaaatccgtgaacagaaaagaaatatatttcatatttagaaaggaggtcgtgcagatggatgctttggtagaagggcttatggaagaacttaattgcgagacagtgttcactatacctttgtttggtggaatcccagtatatgaatccgttgttgttacatggattatcatggctgttgtgttcctgttgtgtattctgctaagccgaaatctaagtgtggaaaaccccagtcgcagacaggtagttgtagaaacagcaataaagggactcaatgatttcttcactgagacagtaggagaaaaaggaaaggcatacattccatatctgtcagcaattgctatttacataggaattgcgaacctgataggactgcttggtttcaagccaccaactaaggatatgaatgttacagcaacactggcattgatgagtattgtgcttattgaggttgcaggaatcagagccagaggaactaaaggctggcttaagagttttgcagaaccaatgcctataatacttcctattaatattctggaagtatttatcaagcccttatcactttgcatgcgattattcggtaatgttttaggttcatttgtaatcatggaattattaaagatggtagttccggcagttttaccggcagtattcagttgttacttcgatatattcgatggactgatacaggcgtatgttttcgtattcttaactggtctttttataaaagaggctacagagtaagagtatatgtaacaagaataaatgttttaaaaaggagattattattatgtcaacaattttagtagcaatcggagcaggtatagcagtattaacaggtatcggtgctggtcttggtatcggtaaggcaacaagcagtgcagtagacgctatcgcaagacagccagaggcagaaagcaagattagtaagtcacttcttttaggttgtgcccttgcagaggcaacagctatttatggttttgttatcgcccttcttataatccttttcttaggctaataacatttatgggaaagataactaagacaagatagaaaggaaggcgaagctagtgttaagtatagatccatggaatatattatggacagtagtcaatctgctcgtcttatatctggtgtttaagaagttcctgtttaagcctgttatgaaagtaatcaatgcaagagaagatatgattaagcagcagtttgatggtgctaagaagagtcaggaagaagcagatgcattaaaggcttcatatgacgaaaagattgaaagtgcgaaggctgaagctgatgagattattgtaaatgctagaaacagagcacaggaagagcatgaggcagctttggaaaagaccagaaaagaaacagaagtaatgcttgaaaaggcaaaggctgatatagctacagagaaagagaaagcaacggaagctgcacaggcagatattgcaagactcgctctcatagctgcaagaaaaatcgtaaagacaggtgatgctcatgacgcaggcagcagtaaataatgcaatagttttacaccggttgtctgtgagcagagaggatgtaagaagggctgatgagttatacagcaaaacttcagaacttcagaaaattctcacgaatcctgaaatacctcttgcaaagaaatacgacatcattgataaagtatttgcacttgatgataccaaggagcttatgaagaatttcattaaagaaatgtgcaagcttggttattgtgatgagatgagagaaatatttgattcatattacagaattgatgatgaagcaaaccacattttaaaagcagagcttataagtgcagacagcagtgatgaagatgataatgcaaagcaggcacaggatttcttaaagagcagatatccggattatacaattgaactgacaaagacagttgatgcggatctcttaggcggatatgttataagagcacatcacaaggaatacgacagaagttttgaaggacgtttttgtcagcttgaaagaaaattaactgggaggtgacccctgtgggcgcaattagtgcaacagatattatctccattatccagagtgagattgagaatttcaattgggatgaagcaagtcgtgagaccggtaatgtaatatgggtcggtgatggaattgctactgtatacggtattgaccatgcaatgtatggtgaaatcgtagtatttgataatggagtaaaaggaatggttcaggatatccgtgagaatgagataggtgttatcttgttcggcagggatacaggaatcaaagaaggaactaaggttgtaagaaccaagaaaaaagccggaattccggtaggcagcgcatttgtaggaagagtaatcaatgcacttggcgagcctattgatggaaaaggcgatattaaagaagaagattatagaccaattgaggaagatgctcctggtatcgtagaccgtaagtctgtaagcacaccaatggaaacaggaatactttcaattgattcaatgttcccaattggtcgtggacagcgagaacttatcattggtgaccgtcagactggtaagacatcaattgccacagatacaattattaaccagaaaggtaaaggtgttatctgtgtgtatgttgcaatcggacagaaggcatctacagttgccaaggttgtatcaacacttactaagcatggtgcaatggattattcaattgttgtatcttcaacagcgagtgatcctgcatcacttcagtatatagctccatatgcaggtactgcaatggcagagcatttcatgcatcagggaaaagatgttcttattgtatatgatgatttgagcaaacatgcggtagcgtatagagcactttcccttctgcttgaaagatcacctggacgagaggcttatcctggagatgtattctatcttcattcaagacttcttgaaagatcaagccgtttaagtgatgcgttaggtggaggctcaataacagcacttcctataatagagacacaggctggtgatgtatcagcatatattccaacaaatgttatctctatcacagatggtcagatattccttgaaactaacctgtttaattcaggtatgagaccagccgttaatgtaggtctttcggtttcacgagttggtggtgcagcccagactaaggcaatgaagaaggcatcaggaagcataagaattgaccttgcacagtacagagagatggaagtatttacacagtttgcatcagatcttgatgatgcgactaaggcacagttacagcacggaaaagcccttatggagcttttaaagcagccactctgccatccactttcaatgcatgagcaggttatgacacttgttatggctaacaacggcgtatttgatgagatacctactaaggaagttaagaaacaccagacagaattacttgaattcatagatctcaagcatcctgaaataggaaagcagattgaagataagaaagagattaatgatgagctggttaagaatattctggaagcagtaaaagaatttgcataatgcatgtgtgctaaaagaaaggtaagcgtatagatatggcaaacacaaaggaaattcaggatcgaataaaaagtatcaatgatacattaaagattactaatgccatgtatatgatttcttcttccaagcttaagaaatctaagaaaatgctttcagacacggaaccatactttttcactctgcagtcagaaatgagccgaatcttaagacatatacctgatataagcagtatatattttaagacaaatgaggataaagacgcagcggataaaaaggtaggctacatagttattactgctgataagggacttgcaggttcatataaccataatgttttaaagattgcgcaggagcagcttgaaaagaatcctaatcattcattattcgtattaggagaacttggacgacattattttgaacagcgcggtattgagattgagaagcagttccactatacagttcagaatcctactcttaacagagcaagaaatatttcagaagaaataatagaactgtacagaaaaggtgaacttgatgaggtgtatatcatatacacaagtatgattaatgctattcaggaggaaacacagattgaacagcttcttcctcttaagaaggcagatttcaatatccagataccggttgatttcaaaagagaggaacttgcattaaaaccttccccagaagtagttatggacagaattgttcctgattatatagttggtttcgtatacggagctttggtagagtcattctcctgcgaacagaatgcccgtatgatggcgatggaggctgcatcaaagagtgcaaaggatatgctgcacgaccttgatatacagtataacagagccagacaggcttcaatcacacaggaaataactgaggttatcgctggtgcgaagtcgcagaagaagaaacgaaagaaataatgcgacggataggagataatatgagtaataaaggaaagattatacaggtaatgggacctgttgtcgatgtagcgttcgaagatgagaaccttccggcaatcagggacgcacttgaagttaataatggtgataaaaaatgtgtaatggaagttgcacagcatatcggtaacgatacagtccgttgtattatgcttgcttccagtgaaggtctttgcagagacatggaagtaacagctacaggcagcggcattaagactcctgttggagagaaaactcttggtcgtctctttaatgtattaggagaggctattgatggcaaagaacagccagatgccaaggaaaagtgggaaatccacagagaacctccaacatttgaagaacagaatcctgcagaagagattcttgagacaggtatcaaggtaattgaccttttggcaccttatgcaaagggtggtaagattggtctgtttggtggtgccggagttggtaagacagttcttattcaggaacttatcagcaatattgcaacagagcatggtggatattcaatattcacaggtgtaggagaaagatcaagagaaggtaacgacctatggacagaaatgaaagagtcgggcgttcttgagaaaactgctctggtgtttggtcagatgaatgaaccacctggagcacgtatgcgtgttgctgagacaggacttacaatggctgaatatttccgtgatgagaagcatcagaatgtgcttttattcattgataacatattccgtttcacacaggctggttcagaggtttcagcacttcttggacgtatgccttcagccgtaggttatcagccaacacttgcaactgagatgggtgaattacaggagagaattgcttctacaaagaatggttctgtaacatcagtacaggcagtatatgtacctgccgatgaccttactgaccctgcacctgcaacaacatttgcacatcttgatgcaactacagttctttcaagaaagatagttgaacagggtatctacccggcagtagaccctcttgattctacatcaagaattcttgagccggacattgtaggtgaggagcattatgaggtagcaagaaaggttcaggaaatcctccagaagtacaaggaattacaggatatcattgctattcttggtatggaagagcttgcagatgaagataaggttacagtattcagagcaagaaagattcagaaattcttatcacagccattccatgttgctgagaacttcacaggtattcctggtgtatatgttccattaaaggagactataagaggtttcaaggcaattattgatggtgagatggatgaatatcctgagaacgcatttttcaatgtaggaactatagatgatgttattaaaaaggctgagaagatgcagtaacatcctgccagaaaggaaaaactaatggctacaagttcattttatttaaaagtaatatcagctaaccgggtgtttttcgctggcaaatgccgttctctgattgtgcctgagttcgatggacagaaggaaattcttgcccatcatgaagatatggttattgcaattgatgaaggtcagatgaagttccagccagagggcagcgacgagtggattcatgctgttgttggaatgggatttgttgaaatcgttaacaaccgtgtaactcttcttgttgagacagcagaaaagcctgaggaaatcgatgtaagaagagcagaggaagctaagcagagggcagaggagagacttcgccagaagcagagtatccatgagtattatcactcaagagcagcacttgcaagagctatggcaagacttaaggcaacatctggaaagtagaatttatgatatatatatgggtttgcacctgccagaatgcttgtgaatagcattctggcaggtgctttttgtcgtgaaggtgtaatggggtagccatggagtggtggattggacgttaaagtagatggaaggcgtgttgaagtccaaaagggaagccgagccgcggcatattggacgttgaagcggtgggaaggcgtgttgaagtccagaagggaagagtcagtctgacaatttggaccttagagaggtgtgatgcacagagaaagtacaaaaggggtgccgaagcatgtagaattgttctttataagatacttgtaaataaatattcagcttgctataatatgcaagatgtattttgtatacacaaataaagtgattggaattaacaaaatacacaatcagggaggaactaaagatgttatctatgaaagaagcgatagagaattatgtggaaggttgtgttggtaaggttgactgtccagcatacaagctttttatgaaagccatacttgcaggaatgatgattgcatttggcgcagccggaagcagtgtggctgcacatgatattgctaatgtaggacttgcgcgtctggttgcaggagttgtattcccaatgggacttatgatggttgttatgacaggtgctgaacttttcacaggagactgtctggcaattatggcaactgtacagaagaaacatacagcacttaagcttatacgaatgcttgttgtagtatatctgggaaatcttcttggctcgttaatgcttacatgtattgattatgtaagtgggcagtataattattcatcgggaatacttggtgcatatacaattaaagtagcaattggaaaatgtaatcttgattttacaacagcacttgcatctggaatattatgtaatatacttgtgtgtgcagcagttatgcttgcggcacgtgcaaaggatgtaaccggaaaactgttatgttgtttttttataatactgctttttgttgtaagcggttatgagcactgtgttgctaatatgtattatgtacctgcagggatgatagcaaaacttaatccattatatgtgaaagatgctatggagcaatatggttatacagcacagcagcttggtacattgaatataccgaattttatatttaataatcttattcctgttacaataggtaatattgtgggaggaatggcattcttcggaataccgctgatgtatatcaatggagttggtgggaagaaggcgtgagacatatcttaaagtatatggatacggattgatgatttagaagaaaatatattattacctatgattattcctttagaaaccattaaagcataggaagatgtgcagtagaagaatcacagacgaacacagacttacgtataatatgtacatgaaccaaaatctgataatatattcctgcaagttccattatgaagattagcacctgaaacatggtgcttttttctttacacaaaaatcacatggtttcggagaatattatatcgggggataaaaatgttatcatctactacgaaaaaatatgaacataaatgatggggcaaaatagtgtatcgtccaaccaggcaatacatttgcatctgacagcaacatggtcgcagaatatagagcagaacctataagaagatattatttctattgcttataggcagaaatattaggatttctgctcataaagcgcagatttcattgtaaatacctataaatgatggaaaaccacattatctataggcaatctttagctttctggcaaggataatgtctgattcgagagaagaatgtatagaaaatacctataagctgtcagaatatacgactacctataggtatcatgacaaaaaatcagacaagacacttcttcatcaataataatatgcctataaatcttgaaatatagatattcttataggaaatgtttaacaacattatagtgaatttatccaatatatgctactaaatcagagtcttgaacgttattcagtaacagatttcttggcagaacagcaagtcttaacccaacatatgtcaatacggatttaatatcttatgtttcagttggcattgcgtgcgcaataatattgcaactcatatatataaagctgaagtgcagagcataagaaaaacacctcttaatcagcaatatacattctgattaagaggtgtttttcttcgtccattattagtaagtatactcatggcgagggcaataataaaatgcctgaagctgactgttacggttataggtaactgtataacaatcggctggtgcatcagcataagtctcaggattaactctgatagttattgtctgtctgtgagactgtccactgttaccgtgttctgcactggtattaccctgtcctacacctttgagattactgatagtctggactgggtacacttttgaattgctaataactccatttgctgcaataatccctccttggaccttatttcaaaatgttacttctacattatatatcggtcaaatgcgttatattattacattgaatttctttataaaaatgtatgatagaggaagataatgcgtaagataagccccattccggactaatccagagtggggcttatctttacgcataagcagttaatgcttaattaatcaatttcttttttcttaattctgtcaagataatctttagtttccttagcaaccacaccgtttaaagcaacgagtgcaataaggttaggaatagccatcagaccattaaatatatctgcaattgtccataccgcagatactgtcatataaggaccgatgaatacgcagaggatatatacccatctgtatgccttaatacatttcttcttaccattagtaaggtattcaaggcagcgctcagaatagtagtcccagccaagaatagttgtaaatgcaaagaatacgaggcataacataagaataaatgaagcaactccatcagggaatggaagtcctaactggaatgctttagttgttactgcaacaccttcaagtcccatatcgtaagctcctgtaagaacaattgcaatacctgtaattgaacagatgataatagtatcaataaaagtacctgtcatagatacaagaccctgacgtacaggttcattggtacgggcggcagcagcggcaataggtgcactaccaagaccggcctcattagagaagatacctcttgcaatacccttctgcatagctacaaccatggcaccaagggcaccaccagcagcggccttaagaccaaatgcactctgcacaattgtaaggatggcagcaggaacatctgtaatattaaataaaataataagaatacctgctaaaaaatatgttgcagccatgaaaggaacaataacctgagcaaccttagaaattctctggattccaccaataagaacaagagcaacacagaatgtaaggataagacagcttataactacagtccatgaatatgttcttccaaataatgaaacagtccatgcgttgttaggatcaaagaaattattaacagcagaagagattccgtttacctgtgtaaatgtaccaattcctaaaagaccaacgcctataccaaagaaagcaaatatcttggcaagccatttccacttaggtcccataccatgttcaatatagttaaaaggaccaccaacaacatgaccatcttcgtcaacctgtctgaacttaactgctaaaagacattctgcgtacttggtagcagtaccaactaaggcagcaagccacatccagaataatgcaccaggaccgcctgagacaatagcagtagcaacacctacgatattacctgtaccaattgttgctgaaagtgctgtacatagtgctgcgaaactgctcacttcaccgtgctttccatcagtttcgtctttgaaaatgtacttaaaagcacgaccaagattagtaaactgaacacccttaagtctgatagtaagaaacagaccaactgaaagtataaggacaatgagtggaattccccagacatatgcgtcaatagtatcgagaatagtattgattttactaaacatattatgtattctccctttttataaaaaattaagacaaattttaccacaaaacaacatttttttcaattgaatactgttatttcctaatataataaataattttgttaaatgttgcttattgacaaactctgtcaatttatatattattgttgaaaacaaaggcgttttgcagataaagcaagacgctttttccttattattaaggtattatccggaagatataatcgggagagactgtttaaaaatgcagcgccgaaggtgacagcgaaaactctcaggcaaaaggaccggttatggacggaactctggagagctgtgtagatacagcaccgaagaagcaatttctaagcagagggatgaggaatattgaggctgatttgcttggggagaatctttcaggtttttaacagaggcataggtgtattaaagtgcgcctgtagcctcttgtttttatgtaaagatatattaggaagggaatcttcttaggaatcttgataaggcgggattgcaaggcacgaaaaggctaaagcaaaggagagaaacattatgaagacagacattgaaattgcacaggaagcagtaatggagccaattaagaatgttgcagccagatgcggcataagcgaggatgatcttgaattatacggaaagtataaggctaagatatcagatgagtacatcaacagtgtcaaagacaatgaagatggaaagttaattcttgttacagccattaatccaactccggcaggagagggaaagacaacaattactgtagggcttggagaagcatttggaaagcttggcaagaaggcagttatagcacttcgtgagccatcacttggtccatgtttcggtatcaaaggtggagcagcaggtggtggatatgcacaggttgttcctatggaagagcttaatctgcattttacaggcgatttccatgcaatcacatcagctaataacttatgtgcggcacttcttgataaccatatacagcagggcaacgaacttggaattgacccaagatgtgttacatggaaaagatgtatggatatgaacgaccgtgttcttagaaatatagttgtaggtcttggttctaaggttgacggaactgtaagagaagatcattttgttatcacagttgcgtcagagattatggcagtattatgtcttgcaacagatatgaaggatttaaaggaaagactcggcaagatggtagttgcttacaattatcagggacagcctgttacagcatcagatatcaaggcagtaggttcaatggcagctttgttaaaggatgcattaaagcctaaccttatccagacacttgagcatactccagcattagtacatggtggaccatttgctaatatcgcacatggctgtaattcagtaagagcaactaagacagcactcaagatggcagattatgtaatcacagaggcaggatttggtgcagatttaggagcagagaaattcttcgatataaagtgccgtaagtcagacttaaagccagatgcagttgtattagtagcaacagtaagagcacttaagtacaacggcggagtacctaagacagaattatcagcagagaatcttgacgcattaaagaagggaatcgtaaaccttgaaaagcatatcgagaatttgcagaaatatggcgtgcctgtagttgttacacttaatgcatttgtatcagatacacaggcagaattagattatatacagaagttctgtgaagataaaggctgtgaattcgcccttgccaaagtatgggaaaagggtggagaaggcggaattgagcttgcagaaaaggttcttaagacacttgagacaaagaagagcaatttccattgtctgtatgagacagaccagccggttaaagcaaagattgagacaattgccaaagaaatatatggcgcaggaagtgttaattattcggcagcagctaataagcagattgcacagcttgaacagttaggatttggtaatcttccaatctgtatggctaagacacagtattcgctttcagacgatccgacattacttggccgtccggaaggatttgagatgaatgtaagagaagcatatgtatcagccggtgcaggcttcatagtagtgcttacaggttcagtaatgacaatgccaggactttcaaaatcaccagcggcatataatatagatgttaatgatgatggggtaataactgggttattttaaaaatgtctcccgggagtgggaggcaggtggttgtgtagtgcattttcaaacgcgctctcgctcggacgaaaacgcagcggtactaagattttgtgaggcttgtcgcctttggcgactccctcgcaaaatcaagtgccggcgtttccgtacggtttgaaaatacactacacaaccacctgcctccaaacttccgggagttttttataagggcgggagacatttttgaatagaacaagatataaatggtgtttgggagatgaattacttttgtcatatcatgactaagagtagggagttcctttacataatgacaaaaaacattttgaatatataacattagaagtaatgtaatgtggtttgaattggctaatgatgctaaaaaagagatataattagatatgaacttgcatagctcaaattagaaaattccatctatgcaagtttttctatattttgaaggagaacaattaaattttttctgaaatacagtagctaaataattagcattagaaaagccagttttataagctatctgactaattgataattgtgtatttccaagtaataactgagcatgttgcaatttggttgctgttaaataatcagtataagaacagccagttacttctttgaataatcgagaaaaatgtgatgttgataaagatatgtatttagcagcatcatctattgtaggattatactccagattattttcaatataaacaagaacgtcatgtattcgcgaatcaaatttattaaaaagcaattgtgaagattctataggcaaatgttcctgatatattgtaaaaaataatttatgtaacataccagttaaaattagttgcgaataaggagtattattgttatattcctgatacatttcttcaaactgggattttatctttatttgcgattcaggtaaaaaatgcaaatagtctgtacataatatgtcaaattctgattgtccaactaaattaattgctggctgtaatgcttcaagtctaaatttaattatgtatcgttcatagggaatatcagacattgcacaatttcgatgatatacattcggtttacttatcccaacatctccggaatgtgcaattttaatattttcataggaaaaccatttacgatctccactgacaagatatcctaacatataatgatcagaggctgcttgcatgtgtggcatagaatatgatgcttcttttatcttgtggtctacatgtattatctcatttgaactcagagggattggcatttgtatctccttatattcattatattgtacacataatagcatcaaattagagaaaatacaacaaaattgatattatatttaatgtaatcattaataaaaactcatataatttcatacatactaaaaggattaaacatggaggttatatgaagaaacaaaatatttatttaaaactatctgtgaagtatatttactattttttattatttattgtattttcttattttttatcccatatcttagttgaaggttcccaaataatatctgtagcaattaatgatatgattgcgggtaagtttgttaatcttaaatcaattttttttacaatattgatttttgttatcctatctacgttaatttctttttttaagaaactttgtggagagcaatttagtttggtaatacagaaggaaagcaagaattatattgtaaaaaaaattgaagagattgaatatgcatacattaatgaacatacaggaactctaattacaaaattaatttccgatattgaaaaaataggccaactttattctgaaataatcccagagatttttcaatcaattattacaattatagcattgagttattcaatatttaaaatggattggatactcttactgagtatcgtgatttgctatcctttagtaatgtgtataagcaacaatctagctaaaaatattaataaattagcaaagtctaggagagcaaagtatgatgaattgacacaagtagctaatgatgatattgcaggaattgcaatagcacgtagctatggtttaaataaaatattaaatgaacgagtagaaaaaattgcaaacgatattttaggaaatgaaatttatcgtaataagtatcaagcaattggaaacgtaattcagagcttagtcaaatggattcctagtgttatttgttctctaattgcattgatggaattttttaaaggacagttatccataggagatatgatggcttttattattttgtttaataaaatatcatctcccatgagtgaattaccttttaaaataaatgatggaagagaattattgatatcaataaaaagaataaatgagataatggctgctccaaaagagcattcaggaacatattgtggaaatacctctgatttatcaaaaacagaaagtgtaatatgttttaaggatgtttcgttttggtataactctaatcgtgaaaagagagtttttgataaattgaatatagatataaaaaaagggactacaacagcaattgtaggatcatctggtgtaggaaaatctacattatttaaaattatatgcggtttagaaaaagtaagagaaggagattattacctatacgaacaaaattttagaaattggaatttaacagctgcaagaaaagagattgctctggtatcacagaatgtatttttatttgcagatacaattttttctaatattacttatggtatggatgatgtgtctatagaagtcgtgatagatgcatgtaaagctgcgtgtattcacgattatattattaccttaccggatggatatcaaacttttattggagagaatggagtaaatttgtcgggcggacaaaggcaaagattaactattgctagagcatttctaaaatcatcttctatcttattattagacgaaccaacatccgctttagatgtaaaaacggaagaagcgataaatagaataatagaaacaagaaagaacaatcaaacagtgatcatcattgctcatagattgtcaactatacgtaatgcagatgatattattgttttacataaaggtaaagtcgctgaaagaggatgtcattttgaattattaggtaaagaaggtttatattcaaaattgtacaataacgaatgtgaaacaggaatagaataaaattattagtatataggagtagtgctaatgacacagaaaaatattttttgtaagtttttaggtttattagaaaacagattaatgatatatattgtatctataataatgatgacaaccttttatgctgtatttgaagttacaggttcgctttttgtaaaatctatatttgatattgcagaaaaaggaaattatgaagatataagtgtaactatgggattctacttattgataggaatagttgcagtatgtattgcttcaatgtttatgtatatttacaataatgaagcaaaaaaaggttctatagaaataaagaagaaggtattttctaaaacattaaattttccaatggaattctatgatacacatcatagtggtgaattgctatcacgtttaatttatgatacagataaagcaagtgaaatatattcatccagactaaggagagtgttggctcctataatttccgttttggtatatataataataatgtttataatcaatccggcaatgacattagttcttgttcttttgaatattttactttttttacttaatacattaatatctaaaccaatgaaaaaagtaggaaaagagtccgcagaaaaaagtgcaataatgacagaaaaattgtctaatatgttgaccggtatagaggtaaataaaatgtacgattttatgcatcataaccggaagaaatatgaactagctaataaagaatattgttatgtacagaggaaaagaatgtacttagttagtattttagaatcccttaatgttgcttttgatatgttgtgtgcattactttttttagttataggtatttattttttacaacatcaattagtttctttgggagatattgcagcagtatatactatatatgctgcacttagtttacaatttttgcaattaggtaaatattatcctgaattgatgaattgtatatcttttgcagagagaatattttcttttctggatgagaaagaagaatgtactgaaatggtaaatgacatacaaattaatagcacttatgaatctagtgcaattaatattgataatttatcttttcaatataatgtagctacacccgttttaaatcaagtaacaataacaatacctaaaaataagaatgtggcattaataggtagatcgggatgtggtaaaagtacaatagcaaaacttctattaggtttttatccaatttcttctggtgatattaaattttttggaaaatctattaaagagcttggattagaaaatgtaagagcattgatagcatatgttcctcaagaagcatatttgtttgaaacaaatattatcgagaatatacgatatggtaaaccggatgcaacagatgcagaaattataaatgcagcaaaattagctaatgctcatgattttattatgaagcaagccgataaatatcaaaccatgataattggcaacggacacaatttgtctggaggagaaaaacaaagaatagcaatggctagagccataataaaaaattcaccaattatgattttagatgaagcaacttctgcactggacaatgaatcagaatttcttatacaagatacaattacaaaattgaaaaaaacaaaaactattattatgattgcacataaacaagcaaccatagattttgcagatatcgtaattgaattataacaattggattccccctcctaaaaaaatttttttaataggagatgagaatatctctccagccccaaccttgccaaaggcggggcggagcagttgtccggtaaagaaaagcccagccgtgtatattagtaaaatcaaaaccgtatgaagacgccggcacttgatttataaaggcagccgccataggcggcaaacctttataaatcttagtaccgctgcgtcggaatccgagcggaagcgtgttttgattttactaatatacacggctgggcgtgctttaggggagcaacttcctacaacataactcccgacttctccttacttctctcaatcatatgattcagcttctcaaatggtttctgtaagaacaatccgataatcagagaaacaactatatatattgaaagaaatgcgaggttcttaatgtaatcgtatcggtacattcctgctatgcattctcttaatgcatccattgaatatgggaagagcaggaatcggtatattatctggtaggcgttaggaagtacttctatagggaatgtaccgcctgagccggcaacctgtataacgagcaggacaattccaagggcttcaccgatattaccaaatgcaacagtaaggctgtacataaagaaggtgaatacgaagcttgagaatgcacatgcaacccagtaaaggaatgggtggtaacactggattcctatgtagaaaagatttccgagtgtaataagcagtacctgaagctgtcctactgcaaagaagataaaataccttccgaagaatttttcatatctttttgcatctgctggaatgtccggagcaggatgcacaggtgtgtgcataatagcaacaagtataagtccaccaaaccacagtgcaagtattgtgtagaatggtgaagcacttgttccatagcttttaacagcatatacctgctctgttgttatatttacaggtgcagaaagaaaatctcccaaagtattggcatctgcatttaacatctctgataataaaccatatgtatcctgttcagtgattgtgtttaatgtattaattgcgttatcaagctttgtctcaaggtcactgagaagctctttagtctgagtgagtgaacccgatgtaagcttaattgcagcagacaggtctgcaacatccatgttcatgtcagaataaagctctgttaatgaactcataatgctttgaatctgggacatctggtttgaaagagcagatgataattcatttaaagattcagcggaattaccatttacaagtgcctgtaaggttattaactgctgctgctgtaactgtaattgtgtataaacttgcggtgcagcactgtttgaactgctgcttattgatgatgtaaggtcagtaattgcaagcattgagttaagaattacatcgtatgttgaaagtgtagtccttgcggatgtaagtctgttaataactgcatccataagagaaccggtttctttatctgcatctttgataactgagtcgccagtaccggcaatcgtagatacgattgtatctataaatgtctggtttacctgctgctgaactgctgttttagccttgtctgttatcttaggtgcaatagcgtttgctttctggttacagtaatattttaactgaggatgttccatggaatcacttaagaagcttataagattcttggaaaaattctctggaacaacgagggctgcataatactcaccgctgtatacgccttcgattgcttcatctgatgaagcaacaaactgccaaccgatagtgttattagttttaagtgcatcaattatggtgtcaccgacattaagctccgttccttcaagagaagtacctttgtcaacagatacaacggcaactttaatcctgcttgtggaagcctgtccatatggatcccagtttgacaggatattaaaccacgaatacaatgcaggaataacggtaagaccgataattacgcatagtgcaattacatttgtttttatatggcgaaggtcagcccgtataattttaaatatatttttcataactgtacctcacttaaaaatgctttgatactgtctgtaagagaagtatcagcctgtttttccttaatctcaatattgagctcattgagctttcttgcgagcttgtcatcaatataatcaataactataagataagcacagaatataaaaagtgagattacccaaagaagcagataaacaaccttagctgtatccatggtaaacataagcaccatgaatactaaaggaattatcatcatacatcttaagcagacctttttcttgtgctggttcttagcgtgcatattttctgcaaacgctgtgatttccgcaataacaacatctatattaaaatcatcattttgcataaattcatttctcctttacataaaatgtgtttctttcatacggcgttcgaagaactcgcgtacttcaagaagtgactttctgattccaagtcccagaataagggaaataacagcataagcgcataatttcacaagaaatacagcgtaatcacactgatataatccgcttattgcctccctcatggcattgattgcataagggaatgggaagtaaaggtacacattctggaagaattcaggaagaagttctattggataagttccgcctgaaccggcaatctgtaacacaatcataactacagcaatagcttttcccaaatcaccaaatgtaagaacaagtgtatatataaataatgtaaatacaaagcttgttatagcggctgcaagccacagcatgaatgggtgggtgcagtcaatttttaaaatatacaaatcaccaagaacaactacaagagcctgaagctgtcccattgcaaggaagagtaatgcacggcctatatatttctgatgttctgtggcatccttgaattcatcatcctcatagtcaacctttactttcataagggcaactaaaacaattcctccaacccagagagcaagtgttgtatagaaaggtgtaacacttgttccatagttagtctgcatatagacgtagatttcttctacctgtacaggttctgacaggaatgacgctattgactgtgcgtctgagttgatgaaatccattatcagtttatatgtagaagatgaacttatatctcctactgaaccagatatggtatcaagtcttttgttgagtgaatcaagtaatgtttttgtgctttctagagttgtattaatatttactgatatatcacttactccaagaagcatctgcgagattccattaatattgtctccggcactgcttatattagctgcaaggctgcttacggcattcttaatggaagccttaagaaggttaacattagttcttattacagtctgtataattgtctggctcttctggagctctgtgcggcactgctcaacaacagacttgattaactggtattttgcctgaagtgtttcaggtgaatcagtaaggatgtctgcacactgctgaatcaggttgtatgcgatattttccatagcattaacagaagcaagagctgactttaaggctgttataacggccgggtcaatgccatctactttactaagagaatcaatggcatcttcaagtgccttattctggtctataagttcctttaactgtttgttggctttgctaagctcaacgccagcctgtccgacatcagttattgaaagctgcacagctttatcaagagaatcaagcacactgtcagatagttcattcatagctttaagctgcgcatcaatctggtttgcaatatcgtctgtgacattatcaagagatttattggcaatatcagcaacatcagttgttccggtaagaacatctttaatctgtggaagaacctcctgaagttttgcaagattatctgccaggtctgaattactcttaataaacatgtcaatcatggtatcgtaagaattaatattggcagatacactctgtaaatccttaactgtcttttcaataattgaaggatcattttcagctatttcgttaagtccctgcataatagtcttaacacacacatcaatgaattcggaattgatagtgttctgaagagtgctttttcctgtatctgtaatcttggaagcaacagcatttttcttggaattctcatagtatgtaactgttggtggattaagaccattgtcaaggaagtcatacaggcttcgtgaaaagtcctcaccaacaacgataacggcatagtacttcccggcattcagtttattcatggcttcatctttagtttctggaaaacgccagcctaatttatcattagaatgaagctgttcaacaatctgtgctcccatattgatagtggaatcgtcagattcagagtagccttcatcttcagaaacaatagcaatctggacggacgcagtgtttgcgtaaggatcccagttggaatatatgttaaaccatgcgtaaagcgatggaataaggcacagaccaagcgcaatggctaaagccagaatattcctgctaagacctttcaaatctcttttgaaaattttaaatatcataacattcctcaattctttaattatcgtttaaaacttatatgtattttacttaagaaactggggaaaatcaatacagagaggataaatcagacatatttaataaataaagaaaggatatggatttatgaacatattgtattgtggtgataaaccaatgcagaaggggattcttttatcttcaatgtctcttattaaaaatgtggatgaaccgttaaatatatatattctcacggttgattacagggaaaaaggtattaattacaagccggttgataaagcatttgcaaaatatctgaaagaaaaattgaataaatcggacattaaagtaaatatctttcttgttgatgttacaagatattttgttgaggagctgccggaggcaaatatgcagagcagatttactgcgtgctgtatgctgcgcctttttgctgataagacagatattaaggatagagttctttatctggatactgatgtgttgtgcagaaaagattttagggatttttattatcagaatatggatggcatagagattgcgggagtttctgattattatggcagatggcttttcggtgatggttacattaattccggagtaatgcttatgaatatgaggatgataagacagaacgggcttctggaaaaatgtcgtgaacagtgcataagaaaggaaatgtttatgcctgaccagacggctgttaatacatttgcaacaagagtcaatctgtgcggacgaaagtttaatgaccagaggagactgcatgacaacactgtttttcagcattttacaactaccttccgggtgtttccggtgataaggactgtttcagtcaagccgtgggagattgataaaatgcataatatacttgggcttcatgaatatgatgagcttctggattcttataacagggagcatgaagagtacatggcagtttcacgtattcctgtgtttttctcgattaatgaacagtacgcaccatatctggcagtgtgccttaaatcgctggctgtacatgtggcttgtgatgagcgttaccgaattattgttatgtgcgataatgtgaagaatattacgatgattcagcttcgtaatgtgataaaggattatgaaaacatagatattgaattcgttgatataagaaagaaaatgtacgaatattctgaaagctttggacagacagttactgacagacaggaaaacaggctttattcaggcgagtttacactgacgatatatttcaggttatttattgcagagctttttccagagcttaataaagctgtgtatattgactctgataccgtaataaatgatgacattgcaaagctttattcagttgatatgggagatgcaatgtttggtgcagtaagagatacatttgcaggaaagaatacaatactggctcattacattgaaaatgtagtgggaatagagcgggatgaatatgtcaattcaggagtgcttcttatgaaccttgataagataagacaggctcatctggcagacagattcttaaagcttatggctgaatatcactttgacagtgttgcacctgatcaggattatattaatgctatgtgtgcaaaagaaatatattttcttgataaggaatggaatgttatgcctaacaagggcggggagtatatagcaagaccgaagctgatacattataatctgtttgacaagccgtggcattacagcgagattccgtatgaggagtatttctggcagtatgcggcggagtcgggattttatccgttgctgattaaacagcgcaagcagtatggggataatgaaaagaaagctgaccgtgagaatttaaagaagcttcttgcaagggctgagaatattgcggacggtgatggggttaagttttctgatgttgtgggaagcagatttgttgtggatagtggtttcatgaaggatagcagtgatgctgcaaaataaattatgtcggaggatatatgattggtgatagggaacaggtctatgaaaatattaggacggctgtaagccttaatcagttgaattcaaaggttgagccgggagaccctaagctgttacgcgaagataaagaagcattactaagacattatattgattaccgcacagcatatggtttttgtgtgaagaaatatattgcagaagctatatttcatgccgggacttctgcggtggggcttataacacaagttgacggacttgagaatctttctggaatcagaggtcctgcgattgtaacatgcaatcatttcagcccgttagaccctgcaattgtcaggtttgcaatgagaaaagctggattcagaagaataagtattgttaatcaggatactaaccttgcaatgaaaggttttgtcgggtatatgcaaaaatatgccgacacaatgcccgtaagcagcctgaaatggtttatggagactgagtttcctaatcagattgagaatgcacttgatgaaaacaaacttgtgcttatatatcctgagcaggaaatgtggtttaattatcggaagccccgtccatgcaaaagaggtgcatatctgtatgcggtaaagtttaatgtgccggtgatttcgctgtttgttgaacagcaggttaaaagtacacatttgcacacattcagggtacatgtcctgccagtaatatatccggacagacagcttgatgaaagaacagcaagtttaagaatgcagcacacagactatgagcagaaatgtgctgcatatgtcatggcatatggaaagaagctgacttacgattttgaagagggagatattgtaggaagataaaagcatttgacgcggaaagaagtgaagtgtatatatatttgaagaaattacaaagattgagaggaaaatgtatatgaagataaaatcagtggcagtatttggagcaggagcagtcggctcttatgttatatggggactttcagaaaagaaggatataagtttaagcgttattgcaaagggcgaaagagcggaaagacttaaggcagaaggctgtctgattaatggaaagacataccacccggaggtattgaccccagaggaagcaaaaggtgttgaccttcttgttgtatcattaaaatacggcgcacttgcaggtgcattagatgatattagagaagccgtcggtgagaatacaatagtcatgagtcttatgaatggtgttgacagtgaagagataatatctaccaagatagataaatcacatatcatttattcacttataaaggtggcgtcacaccgcgaaggaaaggaatatgtgttcaatcctgagactacaataggtattatatatggagaggaaactgcaccatttgagagtgagagagttgcggcaataagagatttatttgatggaacaggacttaattacagagtgactgaacatatcaaagaagagatatggagcaagtatagacttaatatctgtaacaatcttccgcaggctattattggagcaggtgttggctgttatactgacagtgagcatatgaaagcaatcagcgaaggattacgtaaggaggttgaagcagtagctcttgccaaaggcattgatatgagcaggtgtgcagataactcaagccgtggaagcgctgttccgccaacagcaagatattcaacactgcaggatattgacgctggcagacacacagagatagatatgttctccggcgcaatgatgcgcatggggaaagaacttggaattgatacaccatataatgaatatacatatcacatcatcaaggcacttgaagagaagaatgatggcatgtttgattatgatgagaatagtgaggctgtgacttattctaagtagtggcatacggatttagcaggcatgtggggtacaagacagaaaatataagatattaatcatggcgcagcctttttaagggctgcgcttattgcttctataaagacggaatatgtatatctgttggctgaatcataggttatgttggttgtgccggcttccatgactttagcagcaacttcatcaaatgaagttgtgagcttagggtacatagttgtgattgattcagaaagattaacaagctcaatgctgttaatgttagaggaatcaactgtgacctggatatcaacggggttgccgtctaacagaatagaggcggtatatactccggggcagaatttaggagcgtcggcattatcaaggggtgtctcaatattagaagaagcagaagcatttacagtgctgctcttaggtttagtagtattcctggaattatcagaactattgctgccaagacggataacagcgaatataataaaagctattataatagcagcgataaacactccaataaggagctttttaaatggaataacaacaattttagtctgactcatcacaaagaaacctgcccttcatattcattattacaaaatatatggaggatataaggagattatgattaaaatgtggtatattaattacaaatgtattggatagtgtaaaatggtaggtttatgaagaggtaaatgattatgaacagtagatttatcaaaacatttgcagtaatagtgattatatcggcaggcatgacagcgtgtggacaaaagaaaaatgtcacaacggatgatgtatcagaaaaagagatggtgaacatacaggagactgcagcacaggaattgacagcacaggaaattataacacaggagattacaaccgaaaaagaaccggaagatgacgaatatgttcttgtaaataaatacataccggatatatatgtcgaattgatgtatgcgacagacaataactttacaggtgtcagaatatatgatttcacagacgcataccttcgatacggaacagttaagaagcttgcaaatgtgcagaaagaactgaaagaacaggggtacagcttaaagatttgggatgcatacagaccgtttgaggcacagcagaaattatgggaagtatatccggaccctaactatgtggcaaatccggctaacggaatgaaaaagcataatcttggaggaacagtggatattacaatggttgctgctgatggaactgttatatcaatgccgacagaatttgatgatttctctctaaaagcagatagagattattctgatatagaagatgaagaggctgtgaaaaatgtgatgattctacagaatgctatggaaaataacggatttacaggctatcagggagaatggtgggactattcagatacggtggaatatgaagcggttgatttcgaaccatgatgagacatgatatgaaaaagtgcattatggtaaagcaaatgatggtaaagtctattatagaaagattaggggagtaacacatgtcattacaattaattctgggaagctcaggtgcgggtaaatcgcactatctgtatacacatataattgaagaatcaatgaagaatcctgacaggaattatattgttgttgtgccagagcagtacactatggcaattcagaaaagactggtgtccatgcacccaagaaagggaatccttaatatagatgttgtgagttttgaaagacttgcatataaggtgtttgaggaagtgggcgaggacaatcttgaagttcttgacgacacaggaaagaatctgattattaaaagagttttggagcagaacaaggacagattaaaatattttggaagtaatctgtctaatacaggatttgtgtcagagatgaagtctgttatatcggaaatgcttcagtatgatatcaagccggatgttatgcagaatgcggcaggtgcagcatacagtgattcagagggaagtgcagcacttcagtataagcttgatgatatcgtacttgtatacaatgcgtttgctgagtacatagacaaaaactatataactaaagaagaaatactggataaattatgcagtaaggttacagagtcagagagaataaagaattgcgagatagcatttgacggattcacaggatttacgccggttcagtataatttactgacaattcttttatcaatgtgtccgaagatatatgtttctctgacaattgatgcatctgagcgtgaaaattcagtaagaggcagggaagaactttttttcatgagtaaggactgcgtatcaaagctttataagatatgcgatgaagaacatgtgaaagtccttgaacctgtgtatattgcaggaaaagtagtaccgggaaagaatgtaatcgtaaatgttaattcaagatttaagaattcagaagaactggatttcctggaacagaatcttttcagaaacaattcgggaagatttaatcagaagactgacaacatagttatatatgagggagctgttgccaaggaagaattaacatttgcagcaggagaaataataagacttacaagactgtgcggatacagatataacgagattgcgatagttactgcggacatggatggctacggcaaactggcggctaatatattaaagcagaacgatataccatatttcttagattacaagcgccatgtgacggacaatccatttattgcggcaattaacggtgcacttggaataatagagaataattacagctatgacagcatattaggattcctaagaaccggaatgagcggaatggagcgcgaagatatcgatctgttagacaattactgtgttgcagttggaatcagaggcaggggaaaatggcatgaaccatggataagaaagttcaggggaacagtcaataatactgaccttgagaagcttaattcactaagaacaatgataacggatatgttggatccattggaagaagtgcttaagtcaaaggaatctaatgttgcagatatggtaaaggctctttacgaattccttgtgcgtgaagatatggagcagaaggtaagtgtgcttaatgacagcgagtacactggtgatgaatatgcgcagttatataagaaagttatagaagtattagataaaatgtatgcccttcttggaagcgagaaggttggtattaaagaatttaacaagatacttgcgtcaggatttcaggagatcaagataggacttattccgcagaccaacgactgcgttgttatcggagatatagaaagaacccgtcttgacaatatcaaggtcatgttctttgtcggaatcaatgacggcaatgtacctaaaaaggctgattcaagaagcgttctgtcagaaagcgacagggagtatcttgaggataagggaatagttatgtcagcttccgtgagggagaaagcatttacacagagattctatctgtatcttattatgacaaagagtgcggagaagctttacatgtcatatgcggtaaaaaacagcgagggtgcggcgctgatgccttcatatattataagaagcatgagaaaaatgttttcacattgccttaagttatcttacaaagacacggcacagcagaattcatatgtgacaataccgcgggcggctaacagctttgataatactgaaattgctgcaaatgttgatgaggacattatagattcacttacaggcggaaggcttgtcggaagcgtaacttcttttgaaaactttgcagagtgtccgcttaggtattacttaaggtatggagttgatttgaaggaaagggaagaattcacattttcaccggtaaacttcggcgtcgtattgcatgcggttatccgtgaggtgtgcgacgaaatcaagaaaaacggtgagtcgtactatctgatatcagaggagaagcgccgcgagatggtaaaaagaagtgtttctgcaattactgacatataccagaacagcatccttaaggattcaagccgtaattcattcatgattaagcgaatggaagaccttgcagaccgtactatatgggcaatgggtgagcagttaaaatgtggtgatttcgtgccatttgtattcgagcataagtttaatatggaagtcggagacggagacagaaagcagcttatgagcggaacaattgaccgcgtggacatatgtgagaacgacacagatgtgtatgtcaggattattgattacaagactggaaagaaggatttcaacatagtaaagacctactatggaattgatatccagcttatggtctacatggaagcggcgatgaagcttgtggcaaagatgcgtccgggtaaaaatgtgcttcctgccggagtattctactacaacataagcgacccgattgtatctgcaacaaatgagagtgcggaagagatagaggataagattaagggtgaactgcgtcttaaaggaatggtcaattctgataaggatattgccgagaagatggacaatacagaaggaacatcgcttaacatccctgtaagcagaaaagctgatggcggatttgactcacgaagaagcaaggtgatgaatacagagcagtttaatatgcttggaagattcgttgatgtaagggcggttgataccgcggatagaattgcaggcggtgatatcaggagaagtccttataaagacggacagttttcaagctgtgacagatgtccttatggggcggtgtgcggattttctgtggatttgccaggctgcaattacagaaaattaaagaaattcgatgatgaagtgttatggaataatataaaggaaggggttgatgagaatggaaagaaaatggacaccggcgcagaagagcgcgattgatacaagagactgtaatgtgcttgtttcggcggctgccggttcaggaaagactgctgttctggttgagcgaatcatttccatgattacagaccctgacaagaatatagatatagacaggctggttgttgttacatttacaaaggcggcagcagcccagatgaaagacaagataagaaaagcacttgattcaatgcttgacgagaatccgggggatgtgaaccttttaagacagataacactgcttaacaacgcacagataacaacaatagacagtttctgtctatggataatcagaaatcattttccagaggttaatctggacccggggttcaggataatggacgagggggagaagaagcttattgaaaatgatgtgttggaagatgtgcttgaggaattctatgccgaagcagatgaagaattctttaatcttgttgatgcatttggcatgggacgggacgattcagggcttgtgagcattatagataaaatataccatttttcaagaagcaatccgtggattgatgagtggtttgacgagtgcatgttagtttatgatgatgagacttacgataatcctgcaattaaggagctgtatgattcaattaaaaatgcacttttcgattaccgtgataaatacaacagattagtagatatctgttctgagccggcaggacctgcagcatatacaggtgctttgcagtctgatctgcttggaattaatgagatgattaattcacaggattttggagagcttggcagaagaataagaatattttcatttgaagccctgtcaagaaagaaggatgcaggagcagacccggatattaaggaatatgttaaggggcagcgaaagttgtttaaagattacataggacggcttaatgataagatattcttgaaagatgatgagggaatatttgcagacatgcagggggcaggcatccagattcggactttacttaaagtggcaaaggtgtatgccaagcgtgtttcagaggtgaagcgggagaagggtataattgattttaatgacatggaacatcttgctctttcaatacttgtaaagaaagaagatggaaagcttgtatacacagagactgccgacaagcttgcgaacagatttgaagagatactgatagacgagtatcaggattccaatcagctgcaggaggttattcttaatgcggtgtcgaagacgagactgacaggggagaataataatatatacatggttggagatgtaaagcagagcatatacaagttccgtcttgcctgcccggagcttttcatagagaagtacgatacatacggcgagactggcgataatgtaagaattgaattacagaagaatttccgaagtcgggaaaatgtacttgagtgtgccaatgatgttttcagtcatatcatgaataagaatttttcaggaatcgggtatgacgaatcggtaaggcttaatgcgggatttccatatcctgaatacagtgacagtaattacggtgatgaagtcaacaagagtacagatgtaattcttatatcttcagaaaatgaagaagaggctacaacaagagagcttgaggctgacaggcttgcaaagctgattgagggaatagtttcttctggtgtaaatgtgtatgatgcagatgaaaatgtatacagaccggcagaatacagggatatagtaattcttacaaggtcagtgacaggctgggcagatacatttgcagatgcccttatggatagggggataccggcatatactgactcgtcaacaggatatttcagcgtgcgcgagatacaggtaatcttaagcatgcttacaatagtagataatccagttcaggagataagccttgcggcggcaatgatgtcttactttggaggatttacggcagcagagcttggaatggtgagaaagcttggcagagagtatgtggatacgaatgtgcataataatctgtatgaacatttgaaagcagttgcagtgcttggtgaagctgggaaggtgcaggagccggatgttaagcagttgtccggtaaatgtgcattatttcttgcaaagcttacagaatatcgtgacaagagcagcgttgagtcattatatgatctgtgctgggagataatatatgattcaggctactacgattatgtgggaacgatgcctgccggagcacagaggcaggctaacttaaatgttctgctggaaagagcagcaggatacggcaaatcaagttattcaggtctgtttaatttcttaagatatattgaaagacttaagaagtttgacgaagattttgcagagggggctgccagccttgacaatgagaatcttgtaagaattatgagtatccataagagcaaaggtctggaatttccgattgtaatacttgctggagcgcataaaagcattaactttatggatgcaacagcgccggtgcttgtagaccagaacttaggaattgcagttgattatgttgaccttgaaagaagaacgaagacacctaccataataaaaggtgccatggcaagaagaattgtaagggagtcgatatcagaagaagagagacttctctatgttgcaatgacaagagcaagagaaaagctgataatcactggagttgtaaaagatgcagacaagacacttgagaaatacaggggaagtgcaaagcagcttgaagcagatggaatgttgtcttacgcagacagtgagaatataaagaactatcttgatatgataatgccggtgtgccttatggattcagataaattgaaaggcagctttaaagttatggttgatgccggagaggattccttggctgatgcggatgaatccggggggctggctggtgcagcgaatgttgttggaatcggtgaactggctgatgaaattaaggaagctgtgtcttatcctttattagatgagcttccggagtatgttcctgctgataatgcagtcggcaggatgaagctgacggtttcgcagcttaaggctatgcaggcggatgatgattcagaggaaaatgcttacatggatgaatctgtgaaggcagcacttaaaaaggaagaatgtgatgagacaaacagcataattccaaagttcataagcggtgaggaagtgcagcttgctgctaatgagcgtggtagcgcatatcacagggttatggaatgtcttgactattcagtgagtgtgaaccttgatggagttaaagcagatattaacagaatgttagaaacaggcaagatgaatgaattacaggtgaaaagtgtcaatccgtgggatatatatacatttgtacaatcagatacaggcaggagagttgcaaatgcggtgaactgtggcagtgtcagaagagaacagccttttgtatttgagtacgaaggacagcttatacagggtataattgacttgtgttttgaagaggacggagaacttgtgattgttgattataagactgacagggttatgaagggcaaagcgggggaaaaagagcttgtcaaaagatacgcaatccagcttgattactatgcaaaagcgctggaacagcttaccggaaaaactgtaaaagaaaaaattgtatattcatttgctttaggaaaagaaataatgtgttgaaatgacgaaaaattttctctaacatgtaaaatgcggttgaaaatattgtacaataatgttaatatgaatttgatttgtgaataaaacatatcaaatttgcacaaaaatgtgcataaaatggaaaaggagaggaaaaatgaaaaagcaagtaaaaaagtttatgagtgcattacttgcatgtgtaatggtggcagtgtcagttatagtatttgacatgaatccagtacatgcagcttctggcgcaataacagaagcatcaggctggcttgagacagcatatgttaagtggacacctgtaacaggagctacaggttacaatgtatatgttaagtctgcaagtgcctcagattcagcttatgttcagttggacgatgagcttatcagaaagtatccatcttacatgagagcggatgctgtaggattaaaagcaggcgattatgttatgaagattgttccgctgaacaatggcaaggagaatacatcagctgctatcgtttcagataagcttactgtaaatgcacatgacagaagcggatttacattttcaagtaattcaccggtaaagaatggcgttggtgcatataataacgatggtacattaaagtctaatgcatctgttctttatgttacagaagctaataagaatacagttaagatgaagattggtaacacagaatatacaggtgtagcagctattacacaggcaattaaggctaagagtaactgccagccagttgctatccgtattataggtcaggttacattaagcggacttgcctgcaaagatgtatcatcagcatatgcaattggtgttaagggagcagctaacgtaacatttgagggtattggtgatgatgctactttatatggagcaggtgtggctgtattccagtcaacaggcatagaagtaagaaaccttggtcttatgaactggggcggtggaaaagacggagatggtatatctcttaagcagtcacttggtgtatgggtacataacaacgatgtgttctatggtaatgctggttcagatggtgaccaggctaagggcgatggctctatggatttaaaggataattctcagtatgtgacagtatcttacaatcatttctgggattcaggaaagatgtcactttgtggcatgaagtcagagtcaggtgagaactggattacatatcaccataactggtttgaccattctgattcaagacatcctcgtatcagaacaatgtcagtttatgtatataataactactatgatggtaattctaaatatggtgtaggcgctgcaaaggatagtgaggcattcgtagaggctaactattttagaaactgtaattatccaatgctcagttcaatgcagggcagcgacgttcttgcaggcggaatattctcaggagagaatggtggtgtcatcaaagcatacaacaactatatggaaggtcagaagtctgttatatatgctaattcagatacaggcacaacaagtgcaagtgcaactgatttcgatgcatatcttgcagcatcaagaagtgagacagtaccttcaacttataaggcaaagcagggcggaaagacatattctaactttgatactaaggttgatttaggtgttgatactgctgatattgatgcacctgcagatgttccttcaattgtaactaagtatgcaggacgtgttatgggtggcgacttcaagtggacatttgataacagtgttgatgatacaagctattcactcaacagacctttaaaggataaacttaatgcatacaagacatctcttgtatcagtaggtggtggaagcgtatctggtacttcacatacacatacatatggtgagtggacagttgttaaggctgcaacagagacagaaacaggtcttaagagccgcacatgtacagtatgtggttataatgaaacagcagttattccagctattggaaaagatacacctgtcacacctgacacaccagaatcaggagatgcaaaggtacataactttacagaatcaggaacaacaagtgatttctatagtattacaggaagcatagcaacaaataaaggtacagcaacatacaacggtcttacacttacaaaatgccttaagatggagtcatcaacaagcattaagttcacagcaccatccgctggaaagcttacacttgtatttggcggaacaacagcagcttctggcaagggcgtaaaagttaatggaacaagcaaaaaagttggttctgatggtacattaacagtagatgttgctaagggtgctgtaactgtaacaaagggagatgcaatcaatcttttctatatggtatatacaccatctggaacaccagagacaacacatacacataagtatgagtcaaagataacaaagcaggcaacatgtacagaggcaggagtgcttacatatacatgtacatctacaacaggaacatgtgacaagaagacatacacagaaacaatcccggcaactggacataagttcagtacagagtggacagtagatgttgaagcaacagagacaacaccaggaagcaagagccatcattgtacagtatgtgatgcaaagacagatgttacagagatacctgcaacaggagttgttgagaagaagaacggattatattgtgatgatggaacatg

SEQ ID NO: 8511 - DNA, 105919 bp, Unknown
  gut microbiota DNA sequence
attgcgtttgttccttttctgtatgcgcgttttttgtacataatatagcactgggtgcggttgtggtcaaatacggatgggcattatacttaataaaatatttatatatgatatattgaatatgatataaaataatgataatatacatatacaattacatgagatgattttggaatagattgacaccgtatatgacaccatatataatatagatagggggtatttgtaatgtccaaatgggataaattattaatgagaatatctaatttatcaaaggatatccgcttgttgaaagtgaggcaatgaataatgaaaacgcttaacgattatatggcaatgaattatcgtatggaaattatagaggatagagaagaaggcggatatgtagtttcgtatccagaacttccgggatgtcttacatgtggtgaaactattgagtcagcagtagcaaatgctattgatgccaaaaaggcatggttagaggcagctttggaagaaggaatagagatacatgaaccggatagcttagacgaatattcagggcagtttaaacttagaatacctcgaagtctgcatcgttctcttgtagaacattctaagaaagaaggaataagtatgaatcaatattgtgtatatcttctttctagaaatgatgcattatattctaagtaaaaaggaggcacacatggcaataaaatcagaagcaaagctcaccacatttgaggcgattagcatgattgtaggaaacagcattggaacgggaataatagcagttccgtatcttgcaacgaagaacagtatgattgatgttatctggatggtaggagcagcttacatcattaatgtaattctacatcttataattgcggaactttcgtataacaacggtggtgtacagcttgtaaaaagctttgagggggaattgttccacggagttatgaagaaggtattcagctggattgtttttgtggtgtatgggcttgcgattatgataggagtgagcggcaatattaacggtggggcacagatatttgtgaactggttcggactgccactatgggcagcgcagataatatattatgtgattgccggaattgttgtatttatgggaatgaaggcggtaggaattgcacagaaatacgctgtaatacttcttatgggaatagttgcagttatgacagttggaacatttacacatccggttaatggattctatacagcacctttccattggaataatctgcttgcactgtatagtatggttgtatttgcaacatcagctaatcaggcagttattcaggttgttaaagggcttgacggcaatccgggcaagataagaaaatcaatattcgcaggctttggtctgtcgtcagcgttcgtgcttattgtgacacttacagttcttcttggaactaagggaacaatagataaggaacttgcttatatgcagcttggagaaagcatcggaaaatgggcagttattcttgcaggtatcttttcgctttttgctctgcttacaacattctggagcaacacacttgctttaagagatgtcgtgcatgagcaggttggaattggcaaccgtgtaagctggcttatagcgacagttccatgtatattatttgcaatattcggagtgagcagctttataatacttacaagaatcatgagcggtgtagttgtactggtgagcataatgcttgttctgacatatggtaaatcaagaaagaaagcaggagcaagtcctatatgcggagtgataggaacgctgccatttcagattcttatggtagtatcgacaatagtttcggctatcggagcgttaataccactcagctaaagaggtgataacatgtttaattcagtgaatttaaagcagacagacaatgaaacatttacatttacaatagataaagataaagattttaagatattacagcttacagaccttcatctgggatttggttttatatcaagaaagaaggataagctggcgctaaatgcagtaacaaagattattcataaggcaaagcctgatatgatagtgcttacaggagattctatatttccatttctgccaaaggcaggtacacttaataacagaaagcaggcgtacaagctgatgaaattcatggacagttttgcaattccgtatacacttgtatttggtaatcacgattgcgagatgggttcgacttgcaataaagaagagcttgcacagatttataagaaagggaaatactgcatatttacagaaggtaggaaagaacttacaggtgtaggaaacttctttattaatcttaccggctcagatggcaatgctttattgccacttgttatgcttgattctaatatgtatggtgaaggaggctggttttacagcggatttgaccggatacatgatgatcaggtggagtggtgcatgaacaggcttaatgacttgaaaaaatgtaatccggatattaaggcgatggcatttttccacatgccgcctgcggaatttaaggaagcataccgtaagatgaagcttggtgataaaagcgtaatatatcagcatggcagtattgctgagaagaatgagcattttggaatttcaaagtttgaaggaacattttttaacaaagcagtggagaatggcgttattaaatggatgttttgcggacatgaccatctgaatacactttcacttatatataagggaatccagatgacatatggaatgtcaatagattatctcggatataagggaatcaataagagttatatacaacgcggaggaacgctgattacaagaaaagctgacggagatgtgcatgtagacatggttccgcttggcgcgattgtatcaacaagaataagtggtgttaaatctcaaaaaggtgaataaagcaataaaaaaggcctacccaaggaagagagtaagccctgcaatgatttgagcaaaaatcatttacatgtctaatataacacacgaattataacaaaacaagcaatactttgattgtattagaattttacaattctactaaaaaggttttaaacccagtgtttaactgctattgcgtttattaagcagaagtgctattatacttgtgcttttttgagtacaattttatttttgaaggaaatgaaagataatgcttaataagaagataaccatggatatgacgcatggctcactgtggaacaagatacttatgtttgcgcttccacttgcggcaagcagtatattacagcagctgttcaattcagtagatacagcggttgtaggaagatttgcgagcagtcaggctctggcagcagttggaagtaacagttcgcttatatctctgatgattaatctgtttattggaatatcattaggctccaatgtggttatagcacattatatcggacagaaatcagagaaaaacatacatgcagcagtacatacagctatagttgttgccatactcagcggagtatttgtcatgatacttgggcagtttatagcaaagcctgtgcttcttctgatgggaacaccaggggatgttatcgaccttgcagttctttacctcagaatatatctgattggcatgccatttatcatgctgtatgactttggttcatcaattcttagaagtacaggtgacagcaaacgaccactttacagccttattgttgccggaatagtcaatacagtgcttaatctgatacttgtaatagtatttaagcttggggtttcgggagttgcgattgcaacagttatttcaaatgtagttagttcctctattgtaatggttatccttatgcatgaatcagagcctataagacttgatgtaagaaagcttacaattgtgccaagagaattaaagaagatacttacgattggagtgcctgccggattacagggaatggtattctcaattgcaaatgtatgtatacagagtactattaacagctttggttcagcaacaatcgcaggttcagcggctgcgcttaactatgagtttttctcatattttatggtaagtgcatttgcacaggctacggtaacatttacgagccagaactttggtgcaggagaatatgacaggtgcagaaaaatatatcatatatcaatggcatttgcactgctgtcatgcggactgttatcggcagtatttgtgcttggaaaaggtatgttcttagggttttattcgacagacccggatgtattgtattatgcagaacagaggctgataattgcgactacattagaacttcttactgcagtgtatgaaataagcgcaggcgcgatgagaggtcttggacattcgttgctgccggcaattataactgttgttggttcatgtgtattaagacttatatggatatcaacagtgtgtaaagtgttccatgaattctgggtgcttatcataatatatccaatctcatggatagtgacaggaataataatggttatagcatacaatataataaagcggaaagttgtgcgtgaagcaagataatagaataattgatttttagaggagaagagaatgctcaggtattttcttctctttttttatgtatattagttatgcaaatgtgtatttgaatattgacaaaaatattcttggggggagtatactaaaattgatgtttaaaatatgaaagaaagatggcatgaaaaatgaaaattgcaggcagattatactatgtaattacagctttggcagtatttctggcgggtatcatgatgattatatggagtatgactgatactggaaaggcagattacaaagatacagttattgattcagataatactgtcagttcaataataacatgttcatcaggcaataaagttgattttgtggctttgacaaaggaagacagcagaatatatgcatatatagatattgttggaaccggaatagagacaccggtaataagaagtgatgatttaacatctgggtatgcatttacaaagagtaataatacaaagaaattctcagaaagaaacaccgtaatatttcttgacagtggcacatttgcggacattacacaatatctggataacgattatgtggacagtcatagaattattaatgtttatacttcagataaggatatgtcatacagaatatttgcagtaagcagttatagtgacacagatataagcgggaattacgattttacatctttcaatggatttagttcatatattacggacatatcggcagcagataataattattatctggatgcagatacagaatttgacaggaattcagttgtaataaccatatcagtccatataggaaatgagagggtactgatactggcggtcagggagtcagaacaatgaaacacagaacgattattaatatatttacaggtctggctcttgcagcagcggtagcagtaattgcactgataagcataattttaacaggaaagtcgcatttgtataatgcagcagaccgtattgttcagggaaataactgtgacggtggtaaaactaatgaagctgttatatttaacagagagccatatgtatataaaaaaggtcttataaatattcttgtattaggaatagatggagaaggtaatctttatgataatcattcgccaggagatatgggacagagtgatgcggtttatgttgtaagtatagatacacagagcaaggcaactcatgttgtcgggattccaagagataccatgacaacaattgagatgtcagacaaggatggaaatacagttgcagtcaatacaggtcaggtgacattgcagtatggatatggacaggatatacagcaatgtacaagccttatggcaaaatcggtgtccggaattctttataacatacatatagacagagttgttgtactaagcgtgaactcaatagccataattaatgatgcggttggtggtgtaacagtaacaattgaaaatgattttacggatgagagcggagaggtattagatgaagcatttgtcaaaggcaataccattcatttaacaggtgagcaggcaaggctgtttgtacaggaaagagactgtaatgtagcggagagcgcaatggacaggctgtcaaggcaggaacagtatatgcaggcattagaacagctgttatataagaaagttcgcaagaatccatttttaattatgaaaatcattaaggagctaaaaagcaatgacatgctgtacacagatatgacaaatgcagagattgtatatgttttttttcagatagccgaaagtgattttaatatggacagtataattacaattccgggtaaagtaaaaaagggtatcagatatgaagaatattatacggataatgaatcattaaagaaactcattatgcagatattttatctgcctgtggactaagcggtattaaatctggaacaagcagatctaatatatatatttctaaatatacattaaggagaataagatgattaagaaacaattagtaaaaagaataacaacagcagttgttgcaggattgttgtctgttatgatggttatgccagtaatggcaaaaggtaagcaggatgatggtttaatacatccttggggttcagagagtggaacatgcgaagaggctcttaattatgcaagcactgtaactatggatgcagctaagtacgggaaatcatatgatttaagtgttacgtttgattacaatgggaaatatccaggttcatatccgaagctattaggtcttgactctacagagaatgtaataaaggcacttggcaattcatataagcagggagctaaggttgagataatgggtatggtgactatcaagaaaactgacggtgaggctaagaatcaggaattagagttcaatgtatcaggagtaaaggcaggagataatattaaagttatcgacagaaattgggctgctggatatggtgtcagcgatgaagatgtaattaatgtatatgatacagaggttacagatggcaaggttgttgttacacttgatgtagttggtaatcagaaagatgttactgctggtggcaaagtatataaaacaatactttctaacagcattacatttgtaaagatgacatcagaaagtcaggataacaatgcagatgtttctgagaaatcaccagagttttcagaggatgctaagatagtagatgctgatggcaaagaagtagaaagcaaaaatgtagttgcttcaacagagaacttaagcgaagctcaggttacagaagttaaggaaaagcttgcagctaataatgttgtaattaacgacaacagtattgtagattatgttgatatcagccttgttgataattctggaaatgttgtaaagcttgaaaatggttcagttgtaattactattcctgcaaaggaaaatgtatcagcagataagtacacagtaaaggtttaccacataaaagctgatggttctatggaagaagttccggcagaacttacatcagaaggtgtaaagattacagcaacatcattctctccatatgtcgttgtatattcagaaaagagtgcagacattgcacaggagtcagaaaagactgatgcagaaatcaaaacgggtgatgctcacaatgcacttgtgtacgcaattgtagctgttgtggcagttttagcaggtggagcatgcgttttagttaaaactaagagagcatagaaaaataatatttagaaatatataaaaaaatgctataaagacatgaccagcaatcagtctttatagcatttttattataaggagcgaagcccttagatattagtattaagtgcaaaggaatcactattcatatcaataacgatatccttgccgctgttaatcatgaacagcttaacatagttggtaacaaatgcatatccaacggaagtgatgaaactatagtcattatcgaagccctgctcgttagcagcatactgtttgtggttagttacgagataatctaacattctgtcagcagacacaccgcgaccattattagatatcagaggtttgttaatatcgttcttgttttctcttatataattcatgaacttaatttcatataacacatgctcagacatcggttccggataccatgagttatgtggaaatgtaaagtaatcttctatgtaatgtaaggcatagcctaaagacaaaaaagaaaaacagttcattctgccatgtctttcaagacgctgtagccttcttgaaattttattgtaggaagaatcccatgtatgtcccttaatatatgtatgcagaagaatatccggcataatacttccaagtcttaaagcaagatcatgtcttttcttaagcttaggggtaagtcttttggttacggttacatgtccgtacttgttcattaattttcctttcataaatgctttatatccgaataataaatccgaatataaatagtcctttagtcctataagaaagtaacaccttttaatacatttgtctagcacattatggaaaagaatgcatgaaatttatgtaaatttattttgatagtcaagcaaatacaaatcttacgaacatattgcaatcagcagcacttgtttatgtatatagattctggcacagtttagttctgatttttacaatttataatataaatgaggtcgtacaattcaaagcatacaattgttaaggcaaaggcgcccagtacagcggaatccgttggctgggcgcttttcctgtatatcgtacagattgcgggcagccagaaagagatgtagaaaggatggtagttatgggagcaagaattgaagaacatccaatattgggaaaacaagaaaaaggaaggcttgtaatattttattttgatggaaaagaactgacaggctatgagggagaaccaattgcagcggctcttaaagcacagggagttatgatacacagatatacaaagaaagagcataagccaagaggaatattctgtgcgataggaagatgtacagactgtgtaatggttgttaatggaaaaccaaatatcaggacttgtgttactcctttagaggagggtatgaaggtccagacacagtatggagtgagtgataaaccatttgaagagcagtagatgaaaggaagtgtggatatgaagcgatttgatcttattatagttggtgcaggtccgtcggggttatcagcagcaatagaggcagctaagagaggacttgaagtagttgtatttgatgaaaatgaaaaaccgggaggacagctttttaagcagatacataaattttttggttctaaggagcataaggctaagataagaggctttaagataggcgaggatttattaaatgaagcagatgaagcaggagttaaggttgttcttaatgcaacagtctgtggaatgtatcaggacaaagagattacagtaagaattggcgatgagatacatcattttaagggagattcaataataattgccacgggtgcagcagaaaatatggttacatttccgggctggacattgccgggggttattggtgcaggagcagcacagacaatgatgaatcttcatggagttaaaccgggaagcagaattcttatgcttggatcaggaaatgtaggacttgttgtaagttatcagcttatacagtgtggctgtgaggttgtggcacttgttgatgctgcaccaagaattggcggatatggagtgcatgcagcaaaggtagcacgtacaggagtcccattttatctgtcacatacgatagtaaaagcagaaggagatgaccatgttactggagtaacaatagcagaggttgattcatctttcaaattcataccaggtacagaaaaacattttgatgtagacacaatatgtctggccgttggactttcacctatgtcacagcttcttaaaatgtcaggctgtaagatggaggataatccaaagcgtggaggacaggttcctatatgtgatgaatatggaagaacttctattccgggggtattcgttgcgggagatgtttcaggaattgaagaggcaagttcagctatgattgagggacgtatggcaggaatcgcagcagctgagtatctgggatatatagataaaacagaattagatgagaatttaaagagtcttgatgtagcacttgaaggtttaagacagggaatgtttgcaccaaagaacagaggtaagcttatagaaaaaacagaggaaggaatcgacatttctacaacacttcttactaaaggatatgttgcagatgatgagattgagagatttccaggtgtgacaagaaagccgggagttcatccggtaatggaatgtacccagaatataccttgtaatccatgtcaggatgcatgtcctaagaaatgtatcaagataggagaaaagattacttcacttccgggtgttgatgaaagtgcaacatgcgttggttgtggaatgtgcgtggcttcatgttcaggtcaggcaattttccttgttgacgaaacatatgaagaaggctttgcaagcgttacgatgccgtatgagttcttacctttgccaaagacgggtgacagaggaatagctcttggacgtaatggacagaaggtatgtgcggcagaggttatcagtgtgaagtcttcaccagcatttgataaaaccaatctgcttactataaaagttccttcagaatatgttatgaaggcaagatttttcaagaaggaggcgtaatcctcccctcaccaggggttggattttgctacgcaaaataaggaggattgaatatgcatgaagtaaatgaccgttcaagggatataggagaatttgttccggcaccagatgacgatatgctcatctgccgttgtgaagaaattacaaagggcgagataagaaaagctgttcatgagggaatgtggacaatgacagaaataagaagatatttaagaacaggaatgggactatgtcagggacagacctgtgcaaagcttgttaagggaattgttgcaagggaattaggagtatcaccgtcaacacttgaaccagcaacaagcagagcaccaatgagacctacagaaatgagaattcttggtaatgaagcagaggacaacaaggaggtgtaattatggcaaatacagcagatgtaattattataggtggcggaattataggtaatgccatagcctattatctggcaaagaaaggcactgatgtaattgttcttgaaggcagcgaccatattggaaatggtggctcgtcaagaaatggcggaggtgtccgccagtcaggacgagacccgagagagcttcctcttgttatgtatggaataaagaatctgtggccatcattatcagaggaacttgaagttgactgtgaatatcatcaggatggaaatttaagacttggaaagaatgacaaacataaacagatccttgaagggcttaccgaaagggctgtcaaggtgggacttgatgtaagaatgatagatggagatgaagtacgccgtattaatccttatctgtcagatgaggtaacatgtgcaagctggtgcccaacagatggtcatgccaatccgcttacaacaacattaggcttctataagacagcaagaaagcttggagtaagatttattacgggcgaaaaggtaatagaattaaagaagataaaaggcagattaagacaggttatcacccctaataatatatatgaagcagatacagtcgttgtagcagccggatatgaaagtaaagaaattcttggtacagtaggaatagatgtgcctatgagcagagtacttattgaagcacttgtaacagaagctgaaccacatatgtttgaccagatgttaggaacagcagaagctgatttttatggacatcagacaaagcatggttcattcgtatttggtggctcatcaggttatgaggcagtcaataaggataatggaaccccgatatgcagcagcattactgctccttgtatatgcagaggtattatgaaatattttccagatcttgcggatgccaagatagtaaggacgtgggcaggctgggctgaccagatgaaagatggtgttcctgtattaggaaatgtatcagaggttccggggcttgttcttgcaacaggattttgtggccacggttttggaatagcacccgcaattggtcatgaactggcagatttaatagtagatggaaaaacatctatagatataaatgcattgcgatatgatagatttaaggctaaaatataaataatatggcttggacttttggtggagttatatatctgctaaaagtccaaacttgtcgttggcttaaatgtagggggaaaagaggaggcaatatggagtataaaacagacaaattaagaccaacccagccttttcttgtattggagacgcaggattttaagcaggaaatatatcttaatcaggggatatcacatttctacacattcagacttgaaaaaacaaaggaaataactacagttcctgatagttgtgtagatatgcttttcgaatatggagaaaatggaatgactgcttatgcaattggtagtcctattaaagcattagatgtagagtggcaggggaagaaagagtattttggagtaaggttcatgcctggaagcatgccggttggacttaatgtgacattgcgggatcttgttgactgcagattctatctggaagatatacttcttgataataatggaacatttgtaagtgggatgaaaaaaaagaagacattcaaagacaggattaattattttcttgaagaatatactaaactggagatgagacaggaaaagccgtttggtaagatggagatacttatggcagttaaagagctggcatataattcaggaggcttgatgagaatttcagaaatggctgacacagttggatatacagaaagatatattaataagatttttattgagcagatgggattttcccctaaggtattctgcaagataatacagtttcagagaagtctggaattccttaattatggcaatgtggataatatgacggaagcagctgttaatcttgggtattatgaccagccgcagtttataagagattttaagacatattgcggaatgacacctaaaagatatcttatgcttactaagagaatcagatacaacagccttgttgaaaatgtgtcataaaatattcattaattaaaatgtttataataagtaatataattaagtaaaaagtgactttcaacgttaaatatgctacaatatgcaggcaaatataagtgaacggggagatttacatgtcgcagttgacaagaaaagcaataatgaagtgtacacttgaacttgctgaaaaaaaatcactgaagaaaatcacagttaaagatatagccgatgaatgtggtattacgaggagcacattttactatcatttttctgatatatatgatgtattggatggtgttgtccagacaaagattgatgaattcaatgaagagtacaatggtgagatggacaaggttcttatgagatttattgaatatagtataatccataggaaagtatgggctaatctttttgatgcaagaggaagagagtggctggaaaaatatgttaagacacgaattcattatctggcacttttgcagattagaaaaatgtctgaaggatacatactttctattaaggatgttgagattatatgtagtttctatgaagaagctatatttggattgcttatgagatggattattaaagaagaaaaaaccaagactgttgatgaaatcaaggataccgttgaaagaatcgagaaattatttgagggacagcttgagcttattatatctaatatgaagaagtaattgtcgggagtacatcaatggggaatattttaacaaaacagttttataggcagagaaaagattttgaagattcatgtgcaggaagagatgcaggattaacatttccagaaggcgtaatatgcagtactgatattgcatatgctgatgatggaattaaagcacatatgcttgacatatacagaccggaagattcacaggaaaaaattctccctgtaattattaatgttcatggtggagggcttataattgggaataaggagttcaacagatatttctgtgctctgctttgcaagaagggatttcttgtatacagcatagagtacaggctgattccagactgccttatatatgaccagattgccgatgtcttcattgcaatggattatataaaggagaggctggcagcagatggcggtgattcgtcacatgtgtatatggcaggtgacagcggaggagcatgccttatcacatatgccaatgctatccagaataacactaatatagcgagggcagctaatgtcacaccatcaggacttcgcattaatgcgcttgggcttataagcggaatgttctatacatcaagatttgataagattggactttttcttccaaagtatctgtatggcagggattacaagaaaactccattcgcaaagtatgttaatcctgaaaacagggaactgctgaactcacttgcaccagtatggctcgtgacaagccataatgatttcttacgaagatatacaacagattttgagaaggcactgacaagagcagaaagagagcatgaacttgtagtttttcctaagaataaaaagcttacacatgcgttcagtgtgtttgagccgtttctgccagagagcagtgcggttattgatatgatggtggagtatcttaggaagttctgataatattcggacactttgatgaaaatgtccgaaattagtacaattatagaacccgtgtagcgttttcgaacactacacgggttttgttatgccaaatttttacaaaaaaatatataatgtgtgggtgcttttcttagtggacgcacaatataattaaagaaaaaggatggaatattataatgagcactaacgaaataatgccaaagttaaaagactttttatgtgagaatttaggaattgatgcagatgttttagagtttgatacacagcttttcggagatggtgaaataggacttgattcaatcgattcgcttgaaatcattgcttacgttgatgatgaattcggtgttcagatgacaggtgttggcaaagaacacttctacagcattgagacaatcgctaagtatatcgaagaaaatgcataatatattctgatttcacagtatataacctggagccatttatgacttataatcgcaggattcctgcacctagtggaagtaaatgccaccatatacaaagtttattacggtgtgggaaatcaaacgcgttacgcttgaacgagatttcccacaccgcactttagtatatggtggcattaacatccacacggttcggaataatttgattataagtcataaatgactccaggttattaacaaacaaaatagaataataatagtaataaggagcaattatgacagagaataataaccgcgcagtcattacaggtcttggaatgatatgtgctatcggtaattcagtagatgaagcatggaataatgccattaattcggtttcaggaatacataagacaacaacacttgatacaacagactgttacgcagaccttgcagcagaagttaagtgcgacacacttggagattttgagggaagcgaagatgcagaccgttcagcacagctttgtatcaaggcagcgggcgaggcaatgaaggatgcgggacttgatgattttgccggagaccctaaggcttcagttatcatcggaagctgtgtcggtggtgcagtcagcatttctgattattatgagcatggcaagaaagtaagtgatgtaactaagatgccaatctcatcaatagcacctcaggttgcaggtcagtgccatgcaggcggtgttgttactaatattgcaaatgcatgtgcagccggaacaatcagtattgcatacgcatgcgagcttatcagagcaggcaaggcagatgtagtgcttgcaggtggttcagacacatttgcagcagtaccatatgccggattcttatcacttcatgcacttgacgcagatggctgctcaccattcaacagatgtacaggaattacacttggtgaaggttcaggtgtcgtagtagtagaaagctacgagcatgctaaggcaagaaatgcaaaaatgtattgtgaagtattaggtgctggtgtcagcagtgacgcacatcatatcacagctccaagaccggatggagaaggtcagatggaagctatcaacagagcaattaagaattcaggattgaagaaatcggacatcggatatgttaatgcacatggaacaggaacagctaagaacgatgatgcagaattcttatcattacatacaatatttgacggcgagaacgataacctttcagtaagctcaacaaaggctatgacaggacactgcctcggtgcagcaggagcaattgaagcagtattttcaatcaaggcacttacaactaatacagtagttccaacactcggatttaaggacgaggatatggataagcttgccgaaaaggccggaaagatagatttctgccctaataaggcacatgagaaagagcttacaagcgtaatgaacaactcatttgcattcggcggtaataacgcaagtattatctttagcaaagaggctggcaatgtgacagttaaggaagagaagaagcctcttgttatcacaggtattggcgtggttacaccaagcggcaacggtgtagatgcatatgttgcaaatgcagtaaaaagcgaagctctgacagaagctaatttaagaagttcagtcggcaaggaagattatgatgcacttggacttaagatgtcattttacaggaagcttgataatttcagccagcttcaggcagtatcaggcatggaagcacttaaggatgctgattatgcagtaacagacgataatgcaacagatatcggaataattgtgggtacatcagagggcgcacttggaacatgctgtgatttccagagcatgattacagagaagggcaatgcttcaggaagcgcattcaaattccctaacactgtatacaatgcagcaggaggatatctttcaatctgctcaggaatcaagggctacaatgtaacagttactaatggtgcacaatctggtcttgcaagtatggcatatgcaatgagcgtactccgttcaggtcaggaaaatgctatgttagctacaggttctgatgagaacagcgatataatgacagagcttttcggtaaattaggtgtcacatcagaaaaagttgtagctccatttgcaggaaatgacggattcgtattaagcgatggcagtgcttcagttcttattgaggatgagaaggcagccagggagcgtggtgcaagaatctactgccatgcagcaggatatggaatggctcattcaaatgttaagttcggaacacttacaggttcagaggcaggccttacaaatgcagttaataacgcattagcagacgcaggaatgacaattgatgatatagatgcagtatttggtttcgcaaatggaatgaaggctgtcgatgatgtagaaatcaagggattgacagcagtatttggtgacaaactggcagaaaaaccggttgtagaattaaaggaagttcttggtgagtcaagagcagcagcagcaacaacagcagcagcacacgcagcacttatgtttgcaggaaagataccttcacaggatgcttacagcattgcagcagacggaagcgtttctaagacaaaggcagaggcttctaagttaaacaatgtacttgtagctgcctatggtgcaggtggttcatacacagcaattgtactcagcaggtaatgagaatatgggcaaaggctcatggcaatgagtaacatttcttataaaagaaaggacacacagatatgaaagtagcattagttacaggggcttcccgcggtattggaaaggcttgtgctatacgtctggcaaaagacggatatgccgtagtcatcaattacagccattcagaggaacaggcacagaaggttcttgatgaaatcgtggcagcaggcggaacagccataacatataaagcagatgtttcagaccttaatcaggttaagcagatggttaaagatgtaagcaaggagcttggcggaatagatgtactcgtaaacaacgcaggaattgtaagagatgagtatcttctcatgctcaacaaggatacacttgatacatgcatggacttgaatgttaagggttacttctactgcgcacagcaggcagtacttaaaatgttcagaaagaagagcggtgtcatcatcaacatgtcatcagtcagctcgaaattcgcacttccgggacagtctgtatacagtgcaacaaagggtgctgttaattcaatgacacagacaatggctaaggagcttgcaggttacggaatccgtgtaaatgcagtagcaccgggatttatagagacagagatgctggatgcaattccagaagagaagaagaaagagtatttagacgcaatcccaatgcataagttaggaaaggcagaagatgttgcaaatgttgtatcatcactttgctcagacgcattttcatatgtaacaggtcaggttatcgtgcttgatggaggattatcattatgatgaacatatttgagattaataaaagaatcggacagcgcccacctttccagatgattgagaaggtgttagagcttgagcctaatgtaagtgccagaggtattaaaaatgtatcaattaatgaaccatattttatgggacattttcctgacgctcctataatgccgggcgtacttataattgaaagctgcgcccagctctgttcacttgtaatcgatgatggtggaaagagcagggaagagggcaagttatatgtgcttcttaaagtagacggattcaagtttgtaaagcctgtaattccaggagatacacttgatattacagttacagctacaagaattaataaggttcttgcagtatttgatgcggtagttaaggtagatgacaatgtgtacgcaaagggaagcatgacatttacaacagtagaccgcaaggatatatatggaacggaggaataaagtaatgggaaaaatagcagtattattttcaggtcagggtgcacagtatgtaggaatgggcaaagacctttacgattcagattctgatgcaaagaaattatatgatttgggggagtcgctccgcccgggaacagttaaggtgtgctttgaaggagaaggcgaggagcttaccaagactgagaatacacagccggcacttttccttacagaccttgcatttgccaatgcacttaaggatgccggaattaaggctgatgctgtagcaggattttcacttggagagattcctgcacttgcatacgcaggagttttatcaacagaggacgcatttaaactggtagttatcagaggaaccaagatgggtgagctttctacaaagtatgcaggcggaatggcagcagcacttaagcttgctccagaagttgttgaagagacatgtaaggaattcaaggaaatctggccggttaattataattgtcctggacagatttcatgtgcaggaagtgctgacgagatagacgcattctgcgctgcaatcaaggaaaaaggaggcagggcagttaagcttgcagtaagcggtgcattccatactccttatatgaaggatgcaagtgaagaacttgagaaggcactcaaggcaatgacaattaatgctccacagacagagatatatgccaacagaacaggaaagccttatccacaggatacagcacagattatagaaacaattgctcttcaggcttcttcaagcgtaaggtttgaggacacattaaagaatatgtgggctgacggaatagacacatttattgaggtaggagcaggaaagacgcttacaggatttgttaagaagacacttccggaagcaaagatgtacacagttacaacggttgatgcgttgaatgaagcaattgagaacatcaaggcaggagaataataatgacagtcaaatgtaacaaatgtaaagaggaaattaataaagaggatttggagaagaattactacatatgtccgttatgcgggaagctaaaccgcatgccggcaaagaacagacttcagatgcttacagaaaagtttgatgtaatgtttaatgaccaggaatttacagatcctattgatttcccttcatacaaggaaaagtatgagtctgccagagaaaagagcggcgagacagagggcgttgtatgtggcagaggaactatcggcggacaggatacatgtatattcataatggagcctaacttcatgatgggttctatgggaacagttgtcggagacagaattacagcactttttgaatatgctacaaagaacagacttccaattatcggatatacagtttcaggtggtgcaagaatgcaggagggcgcactgtcacttatgcagatggccaaggtttcggcagcagccagaagacacagtgacgcaggactcttatatgttgtatgtacaacagacccgacaatgggcggtgctacagcaagctttgcaatgcttggagatataatcatatctgaaccgggtgcaatgattggatttgcaggaaagcgagtagtagagcaggttacaggtgaagtgcttccggataatttccagagcgcagagttccagttaaagaacggattcatagatgatatcgtgccaagacaggaacagaaagcatatcttgctaacattcttgcaatacatgcagaaacagtaagtgcataacagtattgttttgcaatataaggagaaaaattaatcatggcaaacgagaatttaagtgtttatgacagaatctgccgtacaagaaagagcggcagagcaactgcatcagattatataaatgcaacaataactgattttgttgaacttcacggtgacagatgctttgcagacgaccatgccattgttggaggtatcggacgacttaatggaaagcctgtaactgtaattggaattgaaaaaggaagagacttaaacgaaagacttttaaggaattttggctgcgttcttccagaaggatataggaaagcattaagacttataaagcaggctgaaaagttccacagacctgttatctgctttgttgatacacagggtgctaactgtggtaagggtgcagaagaaagaggacagggacaggcaattgccaacaacctgtatgagcttacagatgttaagacacctattatatcagtaatgattggtgaaggtgggagcggcggcgcacttgcacttgctgttgcggatgaagtatggatgcttgaaaatgcatattattcagtaatcacacctgagtcatgtgcaagtattctattcaaagatcctaagagagcgccagaggcagcagaacatctcaagcttacagccgctgaccttaataaaatgggtatcgtagaaaaggttgttgaagaaccggaagatttttcagaagagaaagaaacagcacattttatgaaaaagcttgctgatgacctttcaaaagaaataaagcagttagagaagaagccggttgataagcttcttgatgacagatacgagaaatatagaaaaataggccgttacagcgaatacagtgaggcagtaggagaggttcctggagcagcacagttacttggtgtatcacaggctcctgcaagaaagagaagaggattatttggacgtggctaagatattagttttaaatggaagtccacataagagtgccagcactacaatggcggtaaccaacgcatttgtaaagggaatgtgcgaaggtggtgaatacgagtcggagataattaatatctccgacttaaatgttactccatgcatgggctgtctttcatgctgggcaaggactgagggcgagtgtgttatcaaaaatgatgacatgccggcagttaagaaaagaatagaagaagcagacattataattgaaagttatccgttgtatttttttggcatgccgggacagatgaagcttttcacagacagacttttaagcatgatgtgtacttacaggggacagaagccacctgaaaatggcgagtcatttcacggcataagaaatccaaagacgggacagaaattggttcttatatcgggatgtgcttattcggagtcagagtcagtctatgattcgcttcttaaggaatatgagtgcatatgtggtaaaaatggatttacagcaattctatgtccacagttaaagacattgattgaactgggtgcaagttcaagacttgacagatatttgtcaaagtatgaggcggctggaaaagagtttgctgcgacaaagcatttgtcagaggagacaaagcagaagctgtcaaaagctccattttcagaggtagtgtataagaatctgcttgataatttctggcacgagcagaaggaggatgagatttgataaagatagttgtagatttgcttggtgctgacaagccgcagacagagcttgttttgggtgcaatcagggcaatcagtgagaataaagatttgtatgtatatctgatgggaaggaaggccgagcttgaggagttccttgccaatgtaacttatgatgaatcgcagcttgagatagtggactgcacacaggagataactaattatgatgacccggttgacgcttaccacgataagactgattcgtccttaatcaagggtcttaaaatgtgccgtatgaatgaggatatcggaggattcgtgacatgtggtgcaacaggagttgtgcttatcagctcaatactgatacttggcaagttaaatgcgacaagaccggcactttcagtagttcttaatggccgcaatgacaagccgttctgtatagttgactgcggcgccaatattgactgcaaggcagaccgttttgttgattttgcaagacttggtgtggcttatatgaagacacttggcattgagaatccgacagttgcaacactttctaatggcattgaagctggaaagggaagtgatgttattaaggaagctcatgagcttttagaaaaatgtggttttaatttcacaggtaatattgaaggcaaagaagtgttagacggcaacgcagatgttgttgtatgtgatggatttgcaggaaatgtgcttcttaaatcaatcgagggaacagcaaaggttgtgtttgatgatataagaagggcagcagcaggtgcatctgatacccaaaaggcacagctagaggcatttattggcagacttgagccaaagtttgattacaacaatgaaggcggagcaattcttcttggtgttaagaaaccggttgtcaaaggacatggagcagcaacggacaaaacagtgtataatacagttaagattgcttatggacttgcaaagaataatcttgtggagaagataagcgaggaatttgagaaaaagtaacatccattgaggtgattgtataatgcaaagagaaaaaaacaacaattttattcttgatttcacaggtgtatatgatgatgaatttgctaaggaaaaaacatcacttacatggatagactgcactgatattacaggatgtgatatgtatgtatcagacgaagctgaaaaacagataggtgaaagagttgattctgttggaattcatggaatacattttcttgattcgggtaactaccattatgttactaagataatgactgacagaattaaggaaccgttttctttagttgtatttgatcaccataccgatatgcaaaaacctatgattgaaggattaacaagctgcggagactgggcaggaaaggtgattaaagacaatccgtatatttgccagcttattctggtgggaccagagaagaaagatattaatgcgattgggttaagaagtaataaactgataacatattcagcacaggagataagagccgaagcaatggaatctaaaacaaaccagattgatttatcagttcctgtatacatatctattgataaggatgttcttgatgaaagcataagtgaaaccaattggagtcagggacatatgaagcttgggacattagagcatatgcttgggataattataagaaaccagaaggttttaggtattgatatatgtggagaatgtgatacaaatatgccgcttcctgaatatatggaagatgaggaaaagaacggagaacttaataaagaattatataattttcttttgaaacgactgaaaaaatatagtttataaatattttataattccgcaatcccatgtaaatactggtgttgcgggattttataattggaaaataaaaataattagcactcaccccttgacagtgctaataaaaaggtatataacatagccaagaacaaaggaagggaaccaaaagaggtacgaaagtaaaggaaagtacctctagaggttactgaaacatcccggttccaaagaaacaaggtaacaagatagtgatatatgttaaaggaggaatgacttatgttgatgcctagtatttttggagagaatttatttaatgatgattggatggacttcggatttcctgaagttgacaaggctttatatggtaagcatgcaaataatgtaatgaagactgatgttaaggaaactgatacaggttatgaagttgatattgatcttccaggatttaagaaggatgaaattaatgcacagcttgataacggttaccttacaataagtgctgctaagggacttgataaggatgaaaaggataagaaaggtaaatacatccgtaaggaaagatatgctggtgctatgagccgtagcttctatgtaggtgaaggtatcacacaggaagatatcaaggctaagtatgaagatggtatcttaagactttcagttcctaagaaagaagctaaagcagttgagaataagaagtacattgctattgaaggctaatgactaatcatttattattgaattagaaagggagcgattgttatggataagaatccaaagcatccattaaagaaaaagaaagtacatcagaagatgaatgttgcagaccacagtgtcgaggaacaggcagcttttggtaagcataagaaacacacatatgaataaatgattttaatcccgtggcggttgtatgactgtcgcgggatttttatttaatcagcaattgctaaatatgaaattttaagaatatatgccattggaagccgcgtgtgtggtattatagaaactgtttaaaaatatgtggaaagaaggcaggatgaaaatgtttaacagagaagataacacatataacgaaatcagggaaaagtcattattccagtggcttgatgagatggaaaagcatgaagacatagcggttcgtggcggggttaaactgacacgggaatatatacagcatttaaaagatgaaaataagaggcttgaagagcagaataagctgaaaaatgaatatcttaagagggttgtgggaagataaagcatttacaaggtagaatcatgaacatacaggtaataaaatccagaagaagaacaataggaatagaggttcatgcagatgggaaagtgatagtaagaactccattgcgaatgtcatcagcagagattaaccgatttatagaagaacatgatgaatggatcaggcagaaactggattatgtcagacagaaatcagataacagacgcggtacaggtgcgccgggtattgaatgtctgtcgaatcaggaacttgataatataaaggatacatttgaaaagagagtacagttttactgtgatataatgaatgtgagcgttggaagaataactatccgtaaccagaaaacaaggtggggaagctgtagttctaaaggcaatgtgaatttcaactaccagttgtattatatgccgcaggagctgatggattatgtaatcgtgcatgagctttcgcacagaaggcatatgaatcattcggcagaattctgggcggaggttgaaaaatactgtccggagtatagaacatacagaaagcagttaaaggaatatgaacttacttagaggaggcattttatgataaggcacatacttttttggaaatatacagataatataaaggcggaacacaaggaggaatgggcattacattttcttcaggattcagttgcaactatggacggcaaggatatagttacaggaagattatgtggagatgttaaggattattaattgttttaaaatagtactggtataatagattatttaatgatacaatccgaatatacttattttgattaacagacaacacaaaaaggagagactatgaaagagtttatttttttgattgtgttgtttatagctaatataatacaggcaatcacagggtttgctggaacagtgcttgcaatgcctgcttctatgtttttgcttggaattgatgatgccaaagtagtgcttaatgtgatggcattaatatcagggttattaatagcaatttcgagttataagagcatcaacaagaaagaattgttgaaaatatgcacaataatgataataggaatgtgcataggtatacagctgtgtaaggtgatttcatctgaatggttgttaatagtatatggaataattattattgtagttgcaggaaagaatctgcttatacataaggagcatcatttaccgggaatactgttgttatgtgtgttgattattgcaggaataatacatggaatgttcgtatcaggaggagctttacttgttgtatatgcgactcagacatttaaagataaagatgagtttcgtgccacaatagcacctgtgtgggtggttcttaattcatttcttattacatcgcagattcacagccatcaatttaacattaataatataagacttatacttattagcattgtaccattaatgattgctacatggataggcaaaagacttgcacaaaaagtatcacaaaagctatttcttactattacatatattttgctgatgatatcaggaatatcacttatagtgtaaatgtaaaggaggaattgtgggattaactataaaagaaattataaagcttgtagatcatttggaaatgaaactggttgcaggtgaagcaggaacagataatgaggtaacatggacacatgtggtggatagtgatgcaatttctgcttttctgcaaggaaaagaacttgtttttactacgggaataggattaaataaagatcttccgcttatagaacttgtaaaagatgtgtatatggacggggcaagtggaattgttattaatattggaccatatatagatgctattggacaggatgtaattgattttgctgatgaaaagggatttcctgtttttgaggtgccatggcatgtacacatggctgaaattatgagaattatatgttatgaaattacaaggcagcaacagaatgtaatagaaataacagcagcacttaataatgcgtttttatgtcctatgcaggaggatttatatgttcctactcttatgagaaaagggtatatgtcagatggcagttattcagtagttatgctggacttttatgcttcacatggtgaagtatcacaggacaggcatgatacactggtttcgcagcttagcggacacatcagagtcaattataagagaattcttttatgcacacaggaaaagactatatatttagttgtgaataattattcagttgaggaagaacgtcaggtattaaatgaaatatttgtaagaatatgcaactggctgagaaaatcggaatttgttattatgacagcaggctctgataacatcagtcttagtaatatacataaaagttatgagcaatcagttatgatgagcaagcttgcaatatcaggagttatacaaggcgagattactactaataatagcaagcttttattttacacggatattggggtgtatagaattcttttgtcattaaaggacaaagaagcaatggaagaatatgtaaaagaaactgtatatcctttattggaatacgataaaatccatggaacagacctttcaggggaattacaatgttatataaggcatgactgtagtttacaggatacagcagatgaactgatggtacacagaaatacaattaattacaaaattaacaaggcagcagatatacttaatatggatttgacaagattatcaaaccgatttgaagttgcgatgggttttctggtaaataaaatgctgaatctataatgtttgtactcaagtacaaaaataattaaactttgttacattgaaagacgtttttttgtatgctagtataatggcagatgagacaaaggcgtccattcacagaatatgtgagtgggcgcctttttttatcccaaaagtctgtttatcaaaataagtaaattaaaaatgtcaggaggataatattatgagtttaacaggaaaagaaatcgcacagatgcataaggattatgtaatgcagtcatggtcaaagtcaggagtagatgcattaccggttgaaagagcagagggaatatatttctatgattatgatggtaataaatatgcagatatggcctcattgcttgtatgctctaatctcggacatgagcttccagaaattgttaatgcaataaaggagcaggcagacaagatgtgtttcatggcaccagcatatgcatcagaacctaagagtgttcttgcaaagaagcttgtagagctagcaggcgcagatacttataaaagagtattttttacaaatggtggagcagaatctaatgaaaatgcaattaagatggcaagaatggttacgggaaggacaaagattttctcatgctacagaagctatcatggagcaacacttggagcttctaatgcatcaggtgactggagaagatatgctgctgaaataggtggcgctaatggatttgttcattttatgaatccacagatgtatagagatggatacacaaaaggggttgacgatgctgaggtaacaaaaaagtatcttgatgctcttgatttacagttaagatatgaaggaccacagaatgttgctgctattgtaatggaatcaatagttggtgctaatggagtaattcttccatcagatggttatatggaaggtgtaagagcactctgtgataaatatggaattcttcttatatgtgatgaagttatggcaggcttttacagaacaggaaaagcatttgcatttatgaactttgatattaaaccggatatcattacttttgcaaagggcgttacctgtggatatgttcagttaggcggatgcatagtaagtaaggctgtggcagagtattttgaagaaaatgtattacagtgtggtcttacatatagcggacatacactcgcatgtgcagcaggtgttgcagcattaaattattataaggatcatgatattgaaggacatgtagctaagatgcacgctatagtagcaccatttatggatgaaatggttgctaagcataagtgtattggagaggcaagatgcataggattatttggagcattagaggtagtaaagaataaagaaacaagagaacctatgcaggaatatggagttccaggaccagtaatgccatggatatttgcagagttaaagaagagaggctttgcaacatttggaagagaaaactttatagagatatgtccaccacttattattacagaggaggaattaaaggaatatctccctattctggacgaagtacttactatggttgatgaaaaatattgtgattaatacatgcgaggtgagcttatgaattgggattatatccagccggtagaaatacattttggaaaaggccgtgtaaatgaaataaaaaatattgcatcatctcttggctgtaaaaagggaattcttgttgcaagtccgttcttctttaaaagcggacttgcaaagaagataatggaagaatcggatggtatgcttgtggcatcatatggagatgtttcaccaaatccggatgtcactgaggtagatgcatgtgctgatataataagacagaataatatagaatttgtagttgttataggtggaggaagtcctatggactgtgccaaggcagcagcaagtgtaagccttactaaagattccataagaaagtatcacggaacaggaatttccctgccagaagaacatcttccgctgattgcagttccgacaacagccggaaccggaagtgaggtaacgtgtgtttctgttttatctgatcacgcaaatggaaaaaaagcaccgattgtatctaatggattttatccggttgctgctattatagaccctgagcttacatatacaatgccaccggcagttacagcaggaacaggtattgatgtattgtcacatgcaattgagggctactggagtaagggacatcagcctatatgtgatgcacttgctatacatgcagcatcgcttgtatttaagtatttgtatagagcatataccaatccgaatgacgaagaggcacgcgaaaaaatgtgtgaagcaagtgtaattgcaggattagcatttacattgcccaaaacgacttcttcacatgcctgctcatttccattgactaatatatatcatattcctcatggagaagcctgcgggctgacactggactattttgtaagaattaattctaagggagaaggagcagaaagagttgaatatctggcagacagattgggatttaaaaatgcgtcagatatggcagatgcaatatatggtttaaagaaaaaacttggactgcgttgtgatttaaaagatttggaactggatgagaagcagataaaagagctagtaacaataagccgtcatcctaatctttataataatccggtagagattactgatgagatgttggacgaaatgtacagatatcttgcatattaataggaggtgacactatgaaattagtaactgcaattgtaagaccggaaaaggtcatgaatgttataaaagcattggaagaagagggatattttgcattttccaagtggtcaatttctggaagaggccgtgaaaagggaattcaggtgggcgatgttttatatcaggaaatggctaaatgcatgctttatattgctgttgagaataaggaaaaggacgaagttgttgatataatcataaacagcgcaaagagcggagacagtggacattgtggagatggaaagatatttgtctctgatataggtgaagcctatacaataagtgaagaaacaagggaagatgatgaatagtatatgatgaggagttggtatttatggcagaaaagagagtgaaacttaaaaaatcaatgggagcaggatccatatgggctgtagctttaggttcaataattggctggggctgcttcatacagggaggtttatggacacagagagccggtggaccattacctttatttctgggcttccttgtgggcggacttctcatgatagtagttggatacagctattcttatatgatagctaaatttcctgtagcaggaggagaatttgcatatgcatataagggatttggaagaacggcttcttacatatgtggatggatgctttcactgggatatctgtctattgttgcacttaatgccacagctcttccggtactggcatcatatatatttccaggagtatttaataaaggatacctgtatacgattgccggatatgatgtgtatatgggtgaggttgccatagcgttattttttataattcttttcggtataatgaattatatgggagctaaatctgtaggaaagttacagctggctatggttcttatcatgtgtgcagcagttgtaatatcagttgtgggaacaattgttacaggatcatttgatacagcaaatcttgcacctgcatacggtgcgggaggtaaaacatttggaggaggatttatatcgattctggcattagctccatttctttatgttggatttgactgcattccacagtctgctgaggagtatgattttccaccacaaaaatgtaaattactgattatatctgcattgataattggcgcagttatatatggtcttatggcattggttacggattgtgtaattccatggcaggatgtgctggcactgacagatgcgtctggtgcaccagttaaatggcataccggagcagtacttgaaatggctatgggaaagataggtgtaatatttgttgcaattgcagtatgcatgggaatatttacaggaatgaacgggttctttatgacatcaagcagactcctgtttggaatggcaagagcaaaaatgttgccagcagcatttgcaaagattcatccaaagcataaaacaccatctgtatgtattatatttgtcatgattgtctgctgtatatgtccgttctttggccgtgaggtaataggctgggtagttgatatgtgttctgtaggtacagcatttggatatttctttacatgtgcaggtgcatatattcttcttaagaaatatggagatgaaaatgatacgaacaggattcatccagtagttgcacttggtggctgcgtaatatcagttgcaatattgttattgctgatagttccaggttctccagcatttatggcaccacagtcatttgttgcactggttgcatggattgtactcggagtaatattctacttctgttcaagaaagaagttcatggtagttactaaaagagaaatggattatctgattcttggaaatgtacaggttgtacgaggtgttagaaaaggtcagaaacaaagtgatattgttcagggaaatatagttaatccaaagtgatttagcatattttctgtgatatagaagttaaataacatgcgaaataataaggcgtaagagaaatcttgcgtcttttttagtgcaattgagtgaattgaccattatgaaagtgttatgtataatcattacataaatagtgacagggaaaattgatatagtggcagtattaactgaaagtaaggacgcaaatgcatattgagcggaaacattagtaactataatcatagaaaagaggtatacatatggaattacaggcagcaatggagaaaagaagaagcataagaaattataatccagagggaaaagttacaaaggagcagcttgaggaacttattaaggctgcatcatatgcaccttcatggaagaatctgcagacatcaagatattactgtgttttatctgaaaatgtggtaaaagaacttagagaaaaatgtcttcctgaattcaatcaggctaattcagacggagcaggtgcatatatagtcacaacatttgtaaagggaatggttggctttgacaagaatacaggcagcccggttaatgaagctggtgacagctggggttattatgacctcggtctgcagaatgagaatctgcttcttaaagctgctgaactggggcttgatactctggtaatgggcattagagatggtgaggcgttaagagaattgattaatattccagacagtgagaatattgtgtctgttattgctgtaggttacagaggacaggaaccacctgaaagacctaagagaaaagaacttgaggttgtcgcaaaatttatataatgtgtatgacgcaggaggatgagcacaccacaaaatgttttggtggggttcggaatcctgcgttttttaattatgtgtaaaaaaatattatatatcccataataggtacatatattgtaatattatttacattgatgtttgtgtatacataaaaatagtgtataataaaagcaaataaatgttcgatagtacgtttgtgataataaagagcagatatcagttttagaacaatttgaattgtgttagggggggtaaaagatgaagcaggaaacattaaataaattgaacctttgcgaagatcatgaacgagagtgcaagctggctaatggtggacttcctgagagcatatgggagacatattcatcttttgctaataccaatggaggcactattttgcttggaattagggagcatagggattcctttacgattgagggattgacagataagcagattattaaatatcagaaggatttctggagcaccctaaatgatagaaataagatatcaaaaaatatactattgaatcatcatgtgcaggttgtagaggtggaagataaaaagatacttaaaattgatataccggcagcagataggcatgataagccggtttatattggaactgatccaatgaaaggcacttataaaagagattacgaaggagattttctctgtactgaagaggcagtcagggctatgtttgcagatcagagagatgtatctggagacgtggaagtattggatgagtttggattggatgttttgaatcaggatacaataaagggctatcgaatcgtatttgagcaacttcatagtggtcatccatggaatgcacttgaaaatgatgagttccttatgaaattaagagcagcggcgaagaataagatgggaaaattatcgccaacgatagcaggattattattctttggagaagcttatcatattactgaagtttttcctaattattttctggattatcgtgaggaatgtgatgataaagccgtgcgttggttgttccgtacacattctaatgagggcgattggagcggtaatatatacgactttttctgtaaagtgcgtacaagaatagacgatgaagtagctgttccatttgccaatagaagagatggataccgggtagacagagtggatgtgcatgatgcgttggaagaggcattggcaaatgcactggcacatgcaaattattatggaagacggggaatcattgttgtcaaaaatggaaaggaacttagcatttccaatcccggaactatcagggtaacaaaagaggagttttatgcgggtggcaatagtgatccacgaaaccctaatattttaaaaatgtttggatttgttaatgttggtgagcgtgctggaagtggtgtcgataagattatgacagcatgggcagaacaaaactggaaaaagccggaatttgatttttcagagcgtaatgacagagtaacattaaaactcgaagttggacaggtggtatatattccaggggcagcagatataaggaattcaacagataatagcgaaacagatactgcaaaagctatgtcaaaagaagataagatacttgcttacattggggagaatggaagtatttctatgcagaaagtagtggaaatctgtaattataaatctagaactggagcaagaaagctaatagataaaatgatgaaagtaggtttgatagaaaaagtaggagaaagaaataatactctttataaaacaaaaaatagtaaaattagtaatttcttttaagatcagagtgaccagtatgtggtcacttttatgattaagtgttcactaggtggtcacaagtggtcacttttaacatcagagtgaccaccatatatacaagcagacagactttggagttataaatcatgagtatatttagaaagaaacacacacaatcctatgataaaatgaataagaaaccagtactgaagacaagcatatgcacaggggagcaggttagcaggttgcaggatttcaggatattcatactggtaagattgaggagataatgctgattaagcagactggggatatagatacatttaaacaaatgtatggaattgatggagagataccaaaggtatactaaatatttacaggtaaagaggactatgaacataccagaaagagcaacgaaggaacagacagaggcaataacacagacagaaggcaacataagggttgcgtcagttccaggttcgggaaaaacatttgtacttacatatagaatagcatatcttataacagaactgtttgttgagccatcatctattgtggcgcttacatttacaaacaaggcggcttcgcagatgaagcacagattaaggaatattgttggtgataacgccaactgttttacaggaacatttcacggatattgtaacatgtttcttaaagaggagattcacaggctgacatttcccaagacattcacgattcttgataagaaggcagagctggagatgattaaggacgtggcagatgatatgggaatatcgctcaaggacaatactgcgaagaagataatgagtgatatagacataaccaagcaggatatgtcctatgttgagcttatggcaggcgttgataagacagagcttaaaagaagggcttccagcgagaaaaacgcggataaaaaggttttctataattatcttaagagacagtgtgacaattatgctctggactttgaagaccttattaatttcactttatatattttaaacaggaatgaagatgtgcggattcgctggcaggaaaaatgtcagtatgtactgtgcgatgagtatcaggatgttaatatgaaacaggacatgctgcttcacattctaagtggattgtatcagaatctgtttgtggtaggtgatgacgaccagaatatatatacatggcgcggttctgaccctgaatacatgattaattttgacaaaacacatgaaaatgtgcaggattattcacttactgagaatttcaggagtactcctcagattgtaaatgcagcgaaatcccttatctctgctaatcagaacaggcttgaaaagcagatgatttctaacagaccagatggcaataagccggtatttaatgcgcttgacacggaggagaaagagtctttgtggatagctgatactattcttgataatgtcgctaagaatatgaagtacagcgaccatactatattggtgcgggctgcttcacagacaaggtcgttagaggaagcatttataaaaagaaaagttccttacaagatactaagcggtgcgaaattctatgaaagcgaagagataagaacggtgctttcatacatgagaatggtgtacagccttacggacatggatttgctgtatactatatccagaccgagaaggggctttggtaagaagtctgttgagaagcttaaaaatgcagcagcacagaacaactgcagtcttttcaaggcacttggaaagcagattgaagatggcgatataacacagaaaaatgttatagaatattacaatgcaatcagtgaattgcatgatacatatgttgcttatacctgtactgatatagtaaacaaatgtcttgatatgggatatcgtcaggcattggagcaggatatcgaccagaccagacttgataatgtgtcagagcttatcaggactattacggcattggaggaagataatcaggaaaaggttgagctggctgatttgttaagccattttgcattattttcagcgcaagatgaggacggagagtataatgttgtaaaagtaatgacaattcatacagcaaaaggacttgagtttgatacagtatttgtaccaggactcgttgaaggacagtttccaagcagcaggcttcgtaatgaagacgaatatgaagaggaaagaagattattgtatgttgcgatgacaagggcgaagaatatgctttacctcagcacttatagaaagaaagacgggcgttttggcgcaagaccatcagcatttttaagtgacattgatactaatcttcttgactgtatcaacaacagcagagtattaatcagaggtgtgactgagcagatgctgccaaaggccgtatttgaggttggagataaagtcagacataaagtatttggaattggcgagattgttaaggtagataaggttacacagacatatgaaatccagtttgagaatatcaggggaacaagaagactgatgtttcgggcagagctggggaatgttgaaaattaaagcaggttagagaatggaaaaataggggaaccccctattttttcattcttgactgcagaaaagtaggaataagagtagttgtaagtaaaatgcttccgatagacaggaaagcatatacgataaggtcggataattatccaacaattataattattaatggaagatatgagcctaaaagccagctggttttgtgtgcacatgaattaggacaagcacttcttcattcagatgatattaataatttcgcagtaacaagtaaaaatgcatttaaaaatgttgaatatgaggctaatctttttgctgtatcgctgctgtttaatgaaagtgattttaatatgaaagtcttaaatattagcaattatctgcttaagcaggtaattgattataatattgcgtttgaagggaagggttatttatggaattttcagatgtaattaaaaacagatattcatgtaaaaaatttagcagcgaacaaataggaaaagataaattagatgctatcttggaagccggaagagtagctcctacagcaaagaatcttcaggaacagcatatatatgttgtacagtctgaaagtgcattagagactattgataagttaacgctttgccgatataacgcacccacagtcctaattgttgcttttaataaaaataatgtgttcacttatccgggagaaaaaagaaactctggaatagaagaggcaactatcgttgcaacccatcttatgttagctgcatacaatgaaggtgttgacagctgctggattaacttctttaatcctgatgaactggcaaaagctttgaatttaccagaagatgaggaaatattaatgcttcttgatcttggagttgctgacaaaacaactactcctctccctaatcataacagcagaaaagcattaacagagacagtgtcgtttatttaaaattacataatatatacatttatgaatataataagccctattttatgctttctccccaaaatttgaatttgaaaaccacaattttataaatggttattaacccccacagggttttaataaaatcctccaaaagccttgaaaataaaggatttatcgcaaaatgctcaccttaacttattatacgatttcacactgttttattcttcccttggaagctgataagggtaaacacaagggcaagaaaatctgataacaagatataacagaatgtggcaatcggagaactgtgaggtatgtgcgaatatattatactggaggatttattatatggacaagtacattttgaaagtatggaggggattacggaatgagattacttttattcttagtccgacagagaaatggggaaccaaaacagagtatacaaagcttaaaaagtttttacataaagatggctatttgcgaattgcaccggaagtgtatatgcggatagtgcaaaaccggaaagcatccgaaaaacatttcagacgaatagaagaatatgcacctaaaaccggaacggtgagacttttacgcttaacagagaagcaatataataatatatatttggtgacgggtgaaccggattatcaaaaaaaatagttggaacaaacagtcatattatgcaaaaatatgatttgtaacagagcacttatctatgtttagaaaataaataaaacattgcactaaatatagtggttgaatgcccctccaaaaatggtgtatcgttcaactagactaaaatattaataaaaaatgatatggtgttagtaatatttatgtggtacactagaaaaaaagaggtgataaaaatggaaggcaagtttaatatttggcaaaaatgcttagaaattgtatgttttgtattgattctggcatctagtatatataaaggacttttttgtgatggagatatgggtgtagtaattactttgtcctttgttgcaattttattatttataattttttcaattgcagcgttatttccagcaacatggagaatgactgatcgagagaaagagaaaattagtgatttaaaacgataccaagagaaatatactagtatatttgttattgtaaatttagtgttgagtatttttatggcttggctaatgttagtaataggatgatgcgttgttataaaaatagaaaatagaggaaatgatgagatattattgtataaaacagctcgacattactgattgtggtgtcgcatgtcttgcgaccatttgtaaacagaatggttacaagataggtattacccagattcgtgaagttgcaggaacagataaacagggaactaatgcatatggtgtaattaaagcagcagagcacttgggttttagtgcaaagggagtaaaagggaataaggaatcattcttttcagagtttcccttgctctgcattgctgttgaatgcccctccaaaaatggtgtatcttcaactttcatgaacagaataatgaagacaataaataaatcaaatttaagtggaaaatatataagatagtaaaatgttactctcgtttcttttgtttttctcccccaatatattataattgggagaaagatgtaacgtttgggagaaacacgcaacaaaaacaggaaagaagagcagtgcttacgatattgtaaaatcattcacggaaaatacgcttggaaaattttcaaaacaggatgccttactttcatgtcccagccttggcagctcctctgttgaatctgcacttaaaaaacttgtagaagaaggagctatttattcagcatgtattagcacggatttttccgtgctttttttattgcttaaatccacgctgatatcaggcattttaaaacttgaagattacaaattcaaagaagataccacccatcaggcttagcagcgtgattaataacgatattatttttgcatgcaatacatactaccaaaagttgcttaaatatagaaaaatatgaaaaaagtactaaaaaacttatggggagggtgaaacttttgtaaaaaaaatagaatataaaaatagtgtctgaaaactgttgactaaaaaaatatattctgttataaaacatttgaaataaatataacaattaaagaaaggaaataacaatctatgacaccacatataaatatgatgaaaaagaaattggaagatatgcatttgcaggaaagaataaattatggctacagaaaagttatcattatgatgctggtttccgggctgttttctataatagttataggtgtgttatttgctaatatgtttaactatgcagaaaatgtttcggctgcagataaggcggttaaaatgtgcagaataaatgttaatgctgctgcaataaatataagagaaatggcattaaataatgatacatcttcttataatgactatgaacttacagtagaaaaattgcttacggatgttgattcccagcttcagattataaagaaaagcggggttctttcggaggcagattataatgaatattcatcttatctttctcagtggggaaacataggttattcgattatagaaaatattaaaaaaggaaacaaggataaagcaactgaagaaattcttaataaatgtactcctgcattgaataaggttgttgaaaaagcaataagcttagatgatattgcagataaggagagccgtaaggcagctatagttacatttatatttgcggttgcaggagttgtatgtattattgtctgtctatcgactgcgtgggtactggcaaagaagataagtaagaaagtgctggcaacgattattgcaccattaaagtcggtagaaaatactgcagatgaactgatgaagggaaatctacacagcacattagactataagtctgatgatgagcttggcagactggcacacagcctgcgtaactctattgctattcttggaagctatgtagatgatatagaccgttcaatgaaattgtttgcagaaggcaatttcgatgtcaaaccggaagtagagtggaagggtgattttgtcggaatactgaattctttcatgttgtttgaggaaagcatggcagaaactattaaaggaatccagagagtttcagatgaagtatcaagtgcagcagagcaggttgcttcaagctctaatgaattggcagatggagcaacgaatcaggcgtctgttgtagaggagcttacagcaactgttgaaggtgttgcggagcaggtagaaagaaattcacagtctgcaaagcaaatcagcaacagagttggaaaccttggagaagctatttctgagagcaacagtaagatgcaggaaatggttgcctctatgaaagatattaatgaggcatcagaagagattgacaagattatttcaacaattaatgaaattgcctcacagactaatctgcttgccttgaatgcatctatagaagcagcaagggcaggagaggccggaaaaggctttgcagttgtagccaatcaggtaaatcttttagcagaccagagtgctaaggcagcaaaggaatctgctgtacttattgaaacatcggtaagggctgttaagaagggtatgacgattgcagatgagactgcaacacagttagaagaggttgctggtaattctaagatgattacagaggaagttgctgatattgctgatacattagagaagcagacggtagaaatccagcagattaatgaaggaattgagcagattaatgatgttgtacagacgaattcagcaacatcacaggaatgtgcagcagctagcgagcagatgagcagcgaagcagagaatctgcgtgaaatgatacgaagatttaaggttgcagactttaagaagaaataacagagcagatgacttgattatttctgaaaagtataagactgtatttacaatctctaacggaaaatgtggataactaaatcgcatatacagatgcattgtttattgtattctgtatatgctttttttaaattgattatccacattttttcttgttttatagttgttacaatcggccaagaactttttacaattttttaagttagtatttattttcgccagaaaaagatgtaatatagttagaaagaactaacatatgatagatacatgaaattgcttttggcgaaaggaacaggatatgattgtagagtttaagaatgttgtaaaggaatatggaagcaaagaggcagtttttaaggctgtcgataatgtgagttttggaatagaagaaggggagtttgtcgtgattctcggtcagtcaggagcgggaaaatcgactgtacttaatatgcttggagggatggatgtgccaacaagcggaagtgtaattgtagacggagcagacatatctggcatgaatgacaagcagcttggtaattaccgtgcagagaaaatcggctttattttccagttttacaacctgattccaagtcttacttcttatgagaatatcgcgctggttaaaagtattgtgaagggcgcgagggatgcggacgagcttttgaagctggtgggacttagtgagtgcagatataaatttccagcccagatgtcaggcggagaacagcagcgtgtctcaattgcgcgagcacttgcaaagaatccaaagattcttctcggtgacgagccaacaggcgcacttgattcagagacaggtgtaattgttctagagctgctgcagaagctctgtaaagaagaaaaacgcacagttattctggtaacgcataatgctgatatagcaaaatgcgctgacaaagtaatccggatgaaaaacggtaagattcgtgagatttacagaaatgagaagccgctttctgttaaggaggtggagtggtaatgcttgcaagaaaaatgtttcgtgacatgaagcataactttggacagttcttttcggtattcattctcgcaatgcttgcaatggcaatgtatgtaacatttgaaggacatgtgttaagtgaggagaatgcaagaaaagtatttcataaagaatgtaataccgcagatctgtgggtgtatggcgaaagtttcagtaaagaacagttagaagacataagaaatttaccatttgtagaagatgtacagcttcgtacgaagttaagcggaagtgctccggattgtggtgatgcacaggtggatatttatctgactgatgagaatactgtcaataaagcatacaggatttcaggggaggaattcaatccgtctgataaggatggtgtatggcttacagacgcatttgcacagaaacgaggcatcaaagtcggagatgattttacggttaaatatgcaggcgggacatttaccaaaaaggtaaaaggtcttatcgaatcgtgtgaatatgagtaccgtcaggctgatggcgatgccgatgtttacatagaaaatattgcatttgtatatatgtcgtatggtgcaatagatataccagttccacacacagagatggatattgtgactaaagatgctggggcactggcacatgaggaagcagttgcagaagcactgaaccataaatattctgcaatcatagaccgtaaatcagtacagggactggcacgttttgacagtgagcttaaacagcatgagagtttttcgtatgtatttgcacttatatttataggtattgctgtattagtaatagctacatcaatgagcagaatggttgaaaagcagcgtacacagattggaaccatgaatgctcttggaatgaagcgttcaaaaatattatttcattatataagcttcagccttatcacatcgggacttggagcagttgcaggtatgcttttgggtgtatttttaggagcgccgtacatgcttgatttatttggagcatactatattgtgccgggaagaaaaagcgaatttaatatgatttacttagtaatcctgctggcaattgttgtgatatgtgcatttgcagcatatgtaagctgcaggaagctgttgaagataaagccggcggaagcactgcgtccggcagcaccaagagcgggaaaaaaatgtcttgccgagagactgccattctgggaaaaattatcattttcagtacagtacaatttgcgtgatatctcaagaggcaaaatgagggcatttatgagtatcgcaggaactgcatttggaatgcttcttatggtgtatggagcaggctgcaacggacttctcgcagagatggaggctattgtattcgacaagacaacaccagcacagtaccagattaaacttgccgaggatgcagatgctgatgaagttaagaaacttgccagttcgcttgatggtgaacttattatgacaagtgcattggaagtatcagcggttaagaatgcagcatccagtgagaagcagaaaggtgtgctgacggttacggaaggaaagaagctgtataatattctggacctggacaatgaagtaacggatatagagcccggaacggttgcactttcaagaaaatttgctgatgagctgaatctgaaggtcggtgacactgtttactggcatctgtatacaagaaatgaatggcatgaggcaaagataggcgtaatctaccgcagttctgaaacacagggaatgactatgctgtatgatgattataagaacacccatgaaacctatcagccaacaatgcttatgtcagataagacacgggataatcttaagtcagatgcatacgtaacctcagtaaatactaaagaccagatgagggaagcgtatgaaaacagcatggaagttgtcaatatgcttgtgtatatgatgatgattttttctgcaacatgtgtggttgttgttctttacaattcaggttcactttcatttaatgagcgtgtcaaagaacttgctacgttaaaggttcttggattccagagtggtgcaatccgtaaaatgatgtcgcagcagaatgtgtggttttcagtcataggaatcatacttggagcaccatttggaagggcttcatttaacatgatgatgaacagtaacggtgagaattttgattataacctgtcgataagaccaattgcatatctggaagccggaatatttgtacttgttgtatcggtattggtaagctttatgttctctaagcggattaagaagcttgatatggttgaggtgcttaagggagtggaataaaagaacaactgaaaaataatacttaaatttggacttcatttttagatatggcattaataacttaaaaagaacttaaattgcataaatgtaatttaagttctttttaagttgtttttgagttactgcatattatttgagattcttgcatataaataaaataaatgataaaattgaaaataaaaatggaggaacttaaatgacagaggatgaattaataggaaaactcaaagcagtccaaaagatgaaatcagaatcaaatactcttgaattaaaaagtgcggaaaatggatgtccacagcacttgtatgattctttgtcaagtttttcaaatcaggatgaaggtggaatcatcatttttggaattgatgagaagcaggattataaagaagtgggagtttatgacccacaggatatacaaaaaaagataaatgaacaatgcttgcagatggagccaatagtgcgagcattgttaacagtcgtggaaaaagatggtaagttttttgtttcagccgagattccgggtgttgatctggctgacagaccagtattttataaaggtaaaggacgtcttaagggttcatatacgcgagtaggggatagtgatgaaccgatgacagaatatgaggtttatagttatgaggcgtatcgaaagaagtatcaggatgatatacgcggagtgcagcgggcaacattgctgtctttaaatcaagagaagttagctctatacattgacttgctaaaaagaggtaaacctaatttatctaacatggataatgcaagtatttatgagttaatgagtgttaccagaaataatgaagtaacattgagcgcagctatgatttttagtccatatccacaggcatattttccacaattatgcattactgcaattgctgtacccggaacagagattggatgtcttggggggtcgggagaacgctttttagacaatcagcgaattgagggcagtattccagaaatgcttgaagaagcaatcagctttgtgaaaagaaatatgaagaataagactattattaatccgaaaacaggaatacgtgaggatagaacggattatcccattactgcaataagagaagctgttattaatgcattggtacatcgcgattatagtattcacacagaaggaatgccaatacaaattattatgtatgaagacagaatggaggtaaaaaatccaggtggtatatatgggagaataaaagttgatcagttaggtaaaatgcagccggacacaagaaatcctgtattggcttttgcgttagaaacattgcatgttacagaaaatagatattccggcataccgacaattcgtagagaaatggaaaagtacaatctaaaggaacctaagtttgaagatgagagaggcagctttattgtgacattttataaggcagataatatcagtaaaacgaaaccaggattggaagagacaaataatcttttagtgttctgtaggacgccgcggacaagaaaagaaatatgtgaatatctgggattgtcatctattacttatgctatccagacatatgttatgccactggtagaaagtggaaaaattaaaatgactaatcctgacaagcccaaaagtacaaagcagttgttctatagtgagtaggcagggcaggtaactaatcatatccaggtttggcggatttccactactttgaataccatagcttaaaactatggcaaactcatatttatatgtattatacacacgaataacttaatgataggatatctgtaacagcatttgctgcatatagaaattatcagggaggttatcatataatgagtacattaaaaacaccattcagatatgattttgtaggaagttttttaagaccagagaagttaaaggaagctaagaagaactttgaagaaggaaagattacgcaggatgaacttgacaagattactgatgagtgtgtcagtgaggtagttgcaaagcagaaggcggcaggatttcatgctataacagatggagaattcagaagaaagttctggcatcttgatttcatgtggggattcgagggagttgaacatgagaaagatggcggtggagtgcagtttaatggggaggttgcagatcttgaagcaacttatcttgttggaaaggttaaggctaagccgcatccatttgtagagtattttaagttcctaaagcagtttgaggatgagaacactgttgcaaaatatacaattccggcaccagcccagatgtatcagcagatgattgttcctcagaacattgaacagacaagaaaattctatgaatctgatgatgagttaattcatgatatcgggcttgcatatcaggatgtaatcagacagttttatgatgcaggctgtcgtaatctgcagttagatgactgtacatggggagcaattgtaggagatgctgcaaagcagagatacaagtcacttggtcttgatatagaagatgtaaaggctcagcttcttaaggttaataatcttgcattagagggcagaccagaagatatgacaattacttcacatatctgccgaggtaattatcattcaacatattttacaagcggaccatatgattcagttgctgattatgtatttgcacaggaaaatgtagatgctctgcttcttgaatatgatgatgcaagatcaggaggtttccttcctcttgcaaaggtttcaccggataagaaggtagttcttggacttatcacaactaagaagccggaacttgagaataaggaagatgttattgcaagaattcatgatgcatcaagatatattccacttgagagattatgcttaagtccacagtgtggatttgcttcatgtgagataggtaataagctcaccgaagaacagcagtgggcaaagcttgcattagttaaggagatagcagaagaagtctggggataaaaataataatcctggttattaacagcagattatgttaataaccaggatatttttgaacataagaaaggcagataagtctttattggaatagcagttgagaccgtaaagaatggattaatagattttgcagttgtatcttcaccagtttatgtggatacatacttgaagatagttctgctacattcttttcaggaaatacttgtaggcggaactacatttacagctgccttgtatatgacagcagacatacagtgagtctggcggcaagaaagctgaggaaaaaactgacgggagagtagataataagtttactcgggcacaaccgactcggtttcatccgaatgtgcctaagttgttcgaaacaatatgcaggcagtatttaatcagaatgaataaagccggaaagatgaaaccggtatttgaaagaattggaaaatactattacgataatccatcaacatatactaatggagaattcgatgcggtatgggtatgagaagataatatttggcttattaatgaattgtataattagtcaatataatcagaatcatcaagtgtgttgagcgcttcatgttcgattgtaacagactggtgagctttacgggaatctggttaacttttttaatgctgaataacatttaaagtgatataataaataaatatttacaaatcagcagtttggagtgaatgaaatgcattttataaagaaaaatattattattccacttgttgtatttataatcggaatgagtgctgtggcaggtattgtatgcagcataaataacgagcagaataagcagaacaggataatggcgaatcttaacgcaatgacttatgcagagcgtattaagacggatattatgaaaggcatagccgtttcggacacattaagacagataattataagtgatgatggacagattaataaattctatgagatagcagaggagatgatggaagattctgttcagagcatccaaattgcaccagatggtgttgtgacagatatttatcctcaggaaggtaatgatgcgggaaagatagatctgttaaatgataaagaccgtggtgaaatatgccgttatggaagagataataaagttgttacaatgcagggaccatttcaattaaagcaggggggatatggtgtagctgtaagaaatcctgtatacattgaagaaaacggacatgaagatttctggggatttgcaatagctataatccgtgttcctgagatttttgctgattcaatgaaggcactttctgattttggttataattatacattatataaaactgcttttccgtgggggtctgaatttgaagaagtgtatggctcggaagaagggttaaagaatcctgtttcatatatatttgatataggagacagcaagtggaagcttgatataatgccatataagactcagtctgaaagaagatatctgtatgcggctggaataggcggagttattattgttctgcttcttacaggatttacatgtgcgctgcttgtgcttgacgaacacagaaagaagtttaagaagctggctataacagatgctttgacaggaataaataaccgtcatggatatgatgaaagagtaacaaggtatcttaagcagaatccggataatcactgtgtaggagtagaatttgatattgatgattttaagactatcaatgatatgtatggtcatgtttatggcgatgtggcacttaaggtattgtccgagggaatgcagaagttttttgataaaaatgtgcttttaggacgaaatggtggtgatgaattctgtattttcctgccagattgtacatgtgcagatgttaaggaaaaactggaggaattcacaaaattaaaacggtcatttaaatatgacggtgaagagcatcagttcactatatcagttggatatgctgaatatccggttcatgctgacaaaccatcaaagctcatgcgttgtgcagatactgcactttatgaggtaaaacttcgtggaaagaatggctgcatggcatataagaatggacttagaatggagattcgtacacagcttggttttgcacttaaagatgtttctgaaaatcttccaggagcatttatcatatacaaagcagataagaatgatgatgaaattctttttgcaaaccgtgagtttatcagatttgcaggctgtaagaacatggatgaactgcttgaatatacaaaaagaagtttccgtaatatcattaaggtggatgaacgggaagctgttatagcagatatatggaagcagatagatgaaggacatactaatggttatacgcatttttatatgcagaaagcagatggcggtcatatacaggtgtttgaccatggaagaattgttgagaatggacgatatggaagagtaatatatgcattgataactaatatggaagctgtgagagaaaattatggaaattcagaatgtaacaattgaggatgcagaggaacttcttgatatatatgcaccatatgttaagtatacagcgataacatttgaatatgatgtgccttctgtagaagaattcagacaaagaattgtgaatatttcaaacagatatccatatatcaaggcagttgacaatggacagattgtcggttatgcatatgctggatgttttaaggacaggagagcatatgactggtctgttgagacaactatttatgtgcgacaggactgcaagagaatgggaattggaagacttttatatgacagacttgaacatgaacttaagagtatgggaatacttaatatgaatgcatgtattgcatgccctgaacaggaaagcaagtatcttaatgatgacagtatccgcttccatagcagattgggattttcagaagttggtcgttttcatgacagtgggtataagtttaaccagtggttcgatatggtgtggatggagaagatgattggggagcataacgcagaaccgaaagaagtctggggataaatatataaaaacataaaactgccgtccgtttaacattaagtttagcggatggcagtttttatatggaatgtttagttataggctgtgtgtatcaagaactgttctgccggttaccggatcagtaataccaagcaatgccatgattagtgccattcttatatatttaccattctggacctggtcaaaatatgcagctcttggatcgtcatcgacatcaagggaaatctcatcgactcgtggcagaggatgaagaacaggcatatctttatcagccagctttaacttttcttcgtcaagaatgtagacatcttttaaacggagatattcttcttcattgaaaaatctttctttctgtactcttgtcatgtacagaacatcaagtttaggaagagtatcttcaaggcttgacacttcctcataagttgaattagatggatttaatacatcgtctctcagataatccggaatccgtaattcttcgggagatatgaagtagaatttattatcagagaaacgagtaaggctgctgacaagggagtgtaccgtccgtccgaatttcaggtcgccacagaaaccgatagtcaggttattaagctttcctttacgctgtcttatagtcatcatatcaataagtgtctgtgtagggtgcgcatgaccgccgtctcctgcgtttattataggaatgcgtgaatatattgatgcctgcagtggagcaccttcttttggatgtctcatcgcaattatatctgcatagcagcttacaactcttgcagtatcagcaacggtttcacctttggaagcactagactgagctgcacttgaaaagcctagcgtctgtcctccaagacttaacatagcagactcgaaagataaacgggttctggtacttggttcgtaaaaaagtgtagcaagctgtctgccatcggcaacatgcttatataattgtggtccaatggatatccgctccgcaagatctaatatattcatagtttcttcaacggaaagatccataggggttatcagatgtctcatagccactctccttttaataaatattcatctctcttagcaccgacagatataaagttgatttctgcatgaagcatatcctcaattgttttaatgtaattttttgcattagcaggaagctcgtcaaatgtcctgcaatgtgatatatcttcttcccagccgggaactttgtatataacaggagtgcataaatcaaggttatcagttgggtcaaattcaaccagagagccgtttgggtcattgtagcctgtaattataggaatttctttcatagagcttaatacatcaagcttggttagtgcgattttgtctgcatgctggcatctgagtccgtatctgcttgcaactgcatcaaaaggaccaacacggcgaggacggcctgttgcagcaccgaattcaccaccggctgctcttaagtcttgctgccatttttctgaaacagcattttcagcaacaaaaggtcctgcaccgacacaggtagaataggctttaagtacaccaacaacatggtcagcgtgtcttccaggaattcctgcaccgataggaccataggcagatatagttgatgaacttgaagtgtaagggaagataccgtaatcaatatctcttaatgcaccaagctgagcctcaagaataacttttttaccacaggataatgctttgtctataaatgtgcctgtatcgcatatgtatttgctgaacttttcagcctgttccctgcaccagtcaagaagtgccggataagacattggctcctgatgatagcagccggcaagctcaaggttcttggactcaagaatagttgtaagtcttgcctgtacagctgtatcatccaaatgaagcaggtcaccaagacgcagagtcttttttctgtatttgtcactgtaggcatatgctatgcctcgtcttgtagaaccgaaagcagagccggttcgttctagtctgttttcttcaagttcatcctgtaccctgtgccatggcatagatattgtagcttttttagataatttcaaatgttttggattaatctgtattcctctgtcttcaatctgctttatttcgttggcaaggtgttcaaggtcaacaaccatgccgtctccaagaatacatataacatcggagtgaagtattcctgatggcagaagattaagaacgaattttccctgattagttacaacagtgtgaccggcgttattgccgccctgatacctgacgactatatctgcattttcagcaagaaggtcaattacacggcctttgccctcgtcgccccagttaatacctgttacagaagtaagcataataataattcctccttatataaatgtatagttaatactaagtgcaataacggaatgtgcggtccgtaataattctggcaaatataagtccgagcggaagtgcaacaattatcataattgcagatgtaaaccatgagaccgcttctgtcagggacattatgccgaaattgtatattgcgcggtataagtaaagtccgggtaccataataactatggaaggaactgtaagtgatattctaggatatccattataatttttaataaatgaggcaagtaatccggcagtagcagcaccaataaatgcggcagcagcggcaggcatgcctgtaaaatcaacaagttcaagacgcagcgtattggcgatacaaccaataagagcagccatagccgccatcggaacagaactgttaaacatgatagagaatccgaatacaccgcagaagcttgcaataagtcttaatatcaaatgtaacatttttccaatatgtaatgtagtaaattcttctggctgcaaatgcagtaacaaagccataatccatgcaaatacggtagcaaccagtacaataattattgaataagtcagcctttcaatacctgaccgtaggtcgagctttgcaaggtcaatgccgctggtgatgaaaggaaatcccggtattatgaaaagcatggaacatatgtatccggcttcatgtacagaagggatattaaacatcagaatagcaagtttaagcagaattgcatatataaggcatgatgcagatatagaaactgctatattcatgaatagtgtaaaatgatgtttaataagctttgtccttataagattacctgttccggctgcaatgaatgcgaaaagcatctctataggaccgccgccaagcagaaatgtgaatccgcaacatgctagagcggcggcaagtccaagcttgaccggtgaatacagggtatgtatctgttcaatttcatcaagccttttatgaatcatttcacctgtaaggtgggcttcttcattaggaaaattgtcaacaaactgttccattctgtaaagtttggaggtattaacaccggtattggcaatgcttaacgactgtgatacgcagtcattaccatcaaagcagttaaattcaatagacataaggccaacatccacggtacaggttactccaagttccttggatagcttattcatagatgtacggacacgccatgcaccagtgccgcatgatagcataatcagacctacacgaccgataacggaggctttttctataaggtctgcattagcaattaatgcattgctgtcggaatccgtatagtcgtgccacggaatttccatatgatttttttccataatgtcagtgtaattagtccttggcatatataatcgcctctgctttcttaacatggtgttcaaggtttcgtaagaatatagaattgggaaggaaaattccaagttcgtcaaaatgttcattgtgttcaacgaatgaatcctgaccatagaatatgtatgccattggaagattcttctcaagctcaagcataagatcccatacagcactataggcctctgcttcggtttccttcattctgacagtgtcaggcagttcgcggataagcagtataccagtgcttctctcaagaacctgctgctccactacagacgggtcatcgccatatgtgtgactgtatctgtaagcctcggcaagaaacatatttttattattatcaaggttcttataaatgttataaaaatgctgatagtctttttcatgaacagaattagcaaattctggtagaagcatacctttatcgtcggtcataattataggattttgctttccatcagcgttgaagcggtatggaataagaaatgaatttctcagtaaatcaaacatggtattttgcgtgatagccataagaaatgcagataagtctttattagaatagcagttgaataatgcttccgtgaattgaagcggagaaagtattgcttcagaatcatcattgcaaaacagattgttacagaatgtctggaaaagtttgttgtaagcccaagggtcatttagaattttatcaaataaaacctcagatttttcttctcttggaaagatagttttttctttcataatcgtcagctccttcttgtttttcaatttcggctagattatactattggcatagagataagtaaaaactataattgatataaatactataacaatatgatatgtcagatgttacggagcgataagttatggatgttaattttgagtattacaagatattttattatgtggcaagatataagaattttacgaaagccgcacaggcattaggaagcagccagcctaatgttacaagggcaatgaactgtctggaacagcagattaattcaacactgtttgtaagaaataaccggggaatacagcttacaccagagggggaaaaactgtatataagggttacagcggctatgacacagcttatggcagcagaagaagagcttgcggacagtgcaagtctttcacatggcagtatttccataggggcaagtgagactgcgcttaatatatttcttcttgataagttaaaagcatttcacatggtcaatcccggaatccggcttaagatatataatcattcaacgccggaggcggttgatgcagtaaaaaatggactggtagactttgcagtggtatcatcacctgtgtacgcagattcatcactaaagacggtggtgctgcattcttttcaggaaatacttgtcggaggaactacatttacagcattgggaagtcaggaattatcaataagagaattgacggattatccactgatatgccttggcagagagactatgacattcagattctataaagatttatttatgtcacatggggttgaattagagcctgatacggaggctgcgacaacagaccagatacttcctcttgtaaaatgtgaattaggacttgcattcttaccagagacgatggcgcaggaatcgattgataagaaagagattgtgaagatatctcttaaggataatattccgaagagaaatatatgccttgtctatgacagtagacacccggtgagttcggcggcaagaaagttgagaaaaacaataggggagattaattatggggagaattaaagtatgtaactttggcagaattatgctgaaaatattctgctggacgacagtaatattatcaatatatctgatattagggcttacaggctgttatgaaaaatggtttggtggtccgacaggaatagtaaaagcgccagtttactggcttatccgggcagggataggaattcttgtggaaagcataatattctggataggaattataatggtgtatgcgacatctgagcagcttggaatcagatggagagtgcttggaatcgtgtgtggctggataccagttgcacatcttgtcatgcttcatattattataaagacagttggtgaggaagtccgcatggagaaaatgcgtgccaagagaaatctgcagcgtaaggcacagcgtatatgcagtacaaaatatcctgttcttatggtgcatggtgtatttttcagggattttgaacatcttaattactggggaagaataccggcagagcttgaggctaatggtgcagtgatttactatggaaatcataacagtgccgcggctgtgcgagacagtgctaaagagctggcagaaaggattcatcagattataagagagacaggttgtgagaaagtaaatgtaattgctcattcaaaaggaggacttgacatgagggcagcattagcgcttacagatattgcaccttatgtggcttctcttacaacgataaatacaccacacaggggctgtcagttcgctgattaccttcttggcaaaattcctgaaaaacagcagcagatggttgccaatacatataacgctggagcggctaaactcggagacattaaccctgattttcttgctgccgtatacgaccttacatcagaaaaatgcagtgaattcaacaatgaaataaaggataatccagacatttattatcagtcagttggttctaaactaaaccatccggcttctggaagatttccgcttaattttacatatccactggtgaaatattttgacggaccaaatgacggacttgttggagaagaatcctttagatggggacagaactatcagtttcttactgtcagcggcaaaagaggcatatcgcatggtgatatgatagatcttaacagggagaacattaaaggatttgatgttcgggaattttatgtgcaggttgttgcgggacttaagaagatgggattttgatttgaaatatattgataaatttccaacatttgtatatactaggtatatacaaagaagagaggtgattgtatgcaggcacaagtaagagaatggggaaatagtcagggaatcagattatctaaggatatattaaaaagtgctggaatagcattaaacgaaatgttagaagttacagtatcagatggagtgattacattagcaaaaactttcagacataaaactttagaagaaagagcggcagaatataatggcaggttaatgcttgatggtgaatatgattggggagaatctgttggaagagaggtatggtgatggggattgcacatcaaggtgacattattaaagtagaaaaaataaaaccgccagtattagttgtaagtaaagatttttttaacgaaagtggagaaataataggctgtcctattattggtgattctaatgaaggaccacttcacatatggacatcaacaaaagaagttgagggatatgttcagtgtgaaaaaatagcgttgttggatttatctgtgcgtggatataaaataatagatagcatgcctctatctgaattgattaatatatctgatgcaatacaaggaatttttgagtatatatgatattaactatataaaatttaaagatggaggcaaaaataagatgaaacttgataaatttataggaatgatgacaggacattttgataacaaagaacaatttgatattatgcagaaggcaggaaaaatatatccttatgcagaacacatcaatactatatgtaatgataaaataaaaaacattcctaaggattttaacggaaaatttgttgttgaagaaagttattatgaaaccaatggaaaacgccatgcatcaccccacattttccttattatggaaactgaggacggaattgttctttcttcatatgaaattccagcaggagaagacaagaatacattttcatataattctatgaagaatgttgattatgctgaactgaaaaaatctgaaaagtttacaccggcactttatcatgaaaagaatggaatctgggagggaggcagcataagccagttttcaccggtaatgacatttaagctttgggaaaagttttctgatagctgcctggaagtatctgaaagcatggaagttaacggaaaaagaacttttggatatgatgaaccaattatttataagaggatataaacagggaaaatcacacttttttaggatatattgtttcataagagttccatatcaataattgaagccatgcaaagattagcaggagagcggcttaaatacgcagtaagcaatgataaataagaaaaaacgcaggatatatgggagttagtcactatatcctgcgttttgtttattcgtttttatatattttattattaattactttaacgattcctataacattgtaagttaagaaaatgttgataggcagctggattagatttttggtaaatctcattgtaagataaaacataaatcctttgccgtacattatgctgcaccagtaagttccaagaagaacatttacaagaagtgtatcaatagtaagggcaagcacaactctaataaggaatttgaaatctataatctctaaaaggctgcgtttttcacctgttacttttttcttggaaattttgatgttgcagtcatagaaaaataaaccatagataagcccagctaaagcagcacttaatgtccagcccggaaaatatggaccagttggcttaataatatactggattatatcgccaagtcctccgcacatgaatcccataacaggaccaaacatgtatccaattgcacaattggcgaggaaagatactgaaattctgagtgtcggggttacattaatagatacaaaaactgctaaaacagtgtgaagtgcgacgaggagagccgcagcaacaattgacttgagacatttgaactcttttgctgaaaatgcaaaattttttaataaaattgacatgaaaataacctcctttgcagtagtattcgcactacataagaggctgttgaccagtatatgtagcagcgggatgcggattatgtatcgcaagaaatcttttcgtccgtatggcaactccctgtccatatggcacttaacgcacatattcctactctgcttatataattgatttgtacaggcactattaaagcacatattcatataaatgtaaagcattatatgaaggctgtttacaatatattataaattctgtttagaattaatgcatcttctgttgtacatcaggtgcatggtcatggcatcctgtgccttgattgcattatgctgtgcaatggcagtagctatttcacggtgagtttcaatagtttctactttaaggacattaccggttgtctcaacaaaaagaggaattgagctgttgataatcggaatgagtcttgggataataagattcttgcttcccattgctattgcggtgtggaattctatatctttctgggtatgatcctttttctgctttagaagctcttcaacttcatcgcacaaagaaacaattttcttaatatcattattatctgcatatgttgcagacatagctgcgatagctggttccagtaaaaaacggacttcaagcagatcccggacaagcttttttgtcaggtatgaatgtaaatccgagtgggtcatcaactacaccgggtgatgatgctacatatgttccagatccctgtctgattgtcacaatgttacgtgaagcaagtaatttcatggcttcacgaagagaacttcttccaatattgagttctttagcaagatgtgcttcattaggaagcttgccacctggctgtaaatgttcatttatcggaacagcttcaacattgcagataatggcagaggcacttggattagcactgcctggaagtgctcttatgccagctacaagtcctgacccgttagcatatgcaagagaagcaggaagacagtcagtaaggcttgcaaagatgaagaatatgaaaccatcagatatagtaactatggatattatggtgttaatgaagacaatattaaaaataagacggaaagatactcagcattgataaaaggaattgtgttcttgacaaataaaggtggtgtgttataattcatttaacatttaagttaaatgttaaatgaaggagggataaatgtgagcatgcaggatacgcttcaggcgcttgctgatcctacaagacgcgagatacttaatctgcttaagcagtcccgaatgtctgctggagagattagcaatcatttttcaatttcgggtgcggcagtttccagacacctgtctgttttgaaggaagctgatttaattcgagacgagcgggagggaaaatacatttattatgagcttaacgctactgtgcttgaggagattttattatggattagtgaattaaaaggagaaaaagaccatgattaaacaacataaaaaaatgttaatattaacatctgtcataacattacttccaatctttataggtttacttttatggagacagctgccagcttctgtcgcaacacattttggagttgacaatcaaccagatgggtattgttctaaagcatttgcagtctttggacttccggtaatgatgctgttttttcatcttatatgtatagttgcaactaatattgaccccaagagaaaaaatataagcaaaaaggtattccatgttgttatgtggatttgtccggtgatttctttggttaattgcaatattctctatgtatataatttgggatataagctcaatattggatttgtctgcggattgttcgttggaattttgtatcttattttaggcaattttattccaaaggtaaaaccaaactatagcattggttttcgcattccatgggcattgaatgattctgacaactggtatcatacacatagatttggcggaaaatgtatggtaattgggggaattgcaatgattgtaacctcaccatttcaaaatgtgtggatatttcttgctctagtcattgtaccatgcattctgccagtagtttattcatatatgttttatcggaaaacaatggggtaagtttattgtatttatggatagaatctactggcttaccacgaaagattttgatgctgccggtgtattttatccggaagaaaaagaatcctgatgataaaagaaatacaattataagattgattgtgttgtcatttgcggctgtatcaatctttgtactattgctggggtcggggttgattattatgtattttcaggatttgttcagttagtgcgatgagtgtctggggagaagaatgtataatatgatacagaagtccgatagggataaccatgactattttgtcaccctagagaacagtatgaataacatgatacctataggtagtcgcatttttgaaagttttatgggacagaaatgataatgactatagaaatagttgcgacatttgcctataaagttacggaacatgagacatttataggaaaaatcattaaaagaaagtgatttacacaggacttacagaagaaaacagaggaattttacctataaaagtgagatgtattatgaatttataggaagcgggtatctggcacatgagactttaggtgtaaggatagagcaggacgggaggaagccggaatacaatggtgttttgccataatccagaagaaagttacaaaagccaggataaaacttcgaagaaatgcatattttaacgaataataatattgaagaaatctataagagaataacagcgttcagagactgaagcagcggataggctgcggggcagtttctggacgcttttttcatattccggctgagaaaaatgttttttttgaaatgaccagatttgtcataaattaattggaattacatgtgaaaaagattataatataaacagcatttgtcaagtttaaaaataatatagaaggaagggatatttataagtttatcaaaagaatatgtaaaaatgcgaatggagcgcaacaaggaaatagctacatctgcgaatctggctgacagcctgacagaacagcagtgtgatgtacttgaatgggcctctgacatgaggcatgtaatgcataagaacagtgaggcattatatgatgttaatgcacctaagcataaggaaattaaagcatttataagtgatacatattattcacagaatccgaataaccttaataaaagattaaaagatgctggattaccgcttatcaagtggtcatttgatgatacaaggattccgacaaatgagctggcaatgattcttgataacagaagacttgagaagagcagaaaaaggcagtgtatcaggactttagaaaaagcaaatgctgatattgagaattattttgcacaaattgatgccaaatacctcacattttattgtccatcaggaaataagagagtttttagtaatcaaagtaaaggggtcagtgtggaatcaaggaatgttaccattgcagaaggctatacaattatggggatcgagagtcttaagaataatatagcctatctgcttcatgtgtatgctggtcagattagtattgaagatattgttgcatatgtcaatgaagatatagaaaacaggatttatcatatggatgcttcaatggctccacaaagtgttcataaagcgactaatgccctggttgaaacaggatacataaaacctgatactaaagaacttatttatattaatcttactaaaagaggcgacgcatttgtaggaagctactgtgggacgcttaacaagatagcagcttcattgtccatactgccatttaataaggcacacaagaatgatattgtttattatagctatctgattggatggcagcgtgctaaaagagaactaaagccactgatccctaaaactgtcgattttattagtaacaagataaaagaaaagcagcagatgatgtataccggtgatgatagtaattacgacatggagatggagcagacaattatccagagcatgaatattaataatttgccggttgtctatgaggttaagaagggtacatatgtaatagcggagataacgacattatttggaaagattaatgtaagtattattaattctttatttgtcggaagcgcatatacattaacaattccgcaatatcagtatactgcaataatccatatggcagataatattgattatggagagattccttatgaggtacagaaacaattgaaggcggttgttcctgaacttatgaagcttatacagtgagaggggaggcagggacaatgaccaatatatacaagaatatttatttgagaagagaagaagaagttttatataatattagaaaaaatgtggatgaaacagtggaaacaccgactatatccaagataatagattatgttctggctgatccatatgaacatattatatatatggatgttaagcttaagatggtaacaagttacgatgcaaccaatgtatttgttgataccggttataaaaatgtgtcaggagaaccattatttctgtcgcttgtgttaaaggatgatgtatttaccggcaaatatgtgggaacgattgaccagcttggcaatgcaattcttaccattgtaaagatgagagtcaatgaacaggaaatatatgataacatggaatttcttaagaacaattatggcaattataagcagtttgttgatgactgggatctcaaggctggagagagagaaaaagataataatctaggggatatgagtactttgtttgaaggaattgatatatcaaaattcccggagacagcagaagaaattccttcaaatgaggatacagcagctgcgtcagaatcagatttttatgaagaagatatggatgctgaatcagaaaatgggcaggaattattgttagaagagattaagaatgataaaatgcatgtgtatgactatattcccgataaattgtatcttgttgaatgtcacacaatgctaggaactatcaacttctcacttgttaataattatatggatgtattcggggataaaatacctctatacagcctgtttattgttcaatacaatcagggtacaagccttggacagttattacaggatgtggatttaagacagtataatctgcagattccagataagattattgatgaaataagtgatgctgtgaattatatcagggggtatatgggcagagaataaaaacgagaaattcaaggagaaataagagaatgtcaaaagatgaatcaaaggatgaatatttaattacagatgtgccccttaaagctctgactgtttttgccatgcctatgattctggggagttttttccaacaagtatataatatggctgactcaattattgtcggtcagtttgtcggttcatctgcacttgcggctgtcggagcatgcgctgctctcacaaatgtatttatttgtgtggcacttggtgccggggtaggtgccggagtgcttgtgagccgttattttggtgcaagaaattatagtaaaatgaagaccattgtatcaacatcattaatcagttttctggttttaagtgtattattgggaatctttggcttcgggttatcacacccaatgatgagtttattacagacaccagctgatatactggatgaggcagtactgtatcttcgtgtttattttgtgggatttccgtttctgtttatgtacaatattctttcaacgatgtttacttcaatcggtgaatcaaagattccgttagtgcttctgatattttcttctgtcttaaatattctgatggatctttggatggttgctggcttacgacttggcgtgtttggtgcagctcttgcaaccctgattgcacagggtatctcagcggtattttcatttgtaattttcttttgccggatgcgtcggtataaaagtcattttgactggtttgacaggaaggagttacgttcaatgcttcagattgccataccatcaattcttcagcagtctacagtatcgattggcatgatgatagtacaggcagttgtaaatccgtttggtacacaggcactcgcaggttatgcagcgacaatgagagtagaaaatgtattttcacttatatttgtatccattggaaacgcagtgtcaccttatgtttcccagaatcttggcgcgaagaaaattgggcgtatcaaaaaaggatatcatgctgcactcgtgttagatatatgttttgcggtccttgctttcatagtcattgagacactgcatacacacatttcttcgctgttccttggtaaagatggaacagctttggcatatcaggtgtcaggggattacatgaaatggttaggttactttttcattttcatgggtatcaagatggcaacggatggagttcttcgtggtctgggaatcatgcggccatttcttatagctaatatggttaaccttgcaatccgtctgtcagttgctctgatttgtgcaccgcgttttggtatagagtttgtctggcttgccgtaccagccggctggtttgcaaattttctgatttcttatgtggcactcagaaagtcatggtcggttgaaaaagttgattgatgagttcgtgagcgtgcttaattggcatgacggctaatgatgttcaaaagattttgaacctgaaataaagataacatgtttgacataaaacccgttgaatgataatataattaaagaggcgctaccgatagacggttagcctgatatattttttggttaaaacaaccgccaagtttagcagaccgtggcggttgttttgtgtttattttttgctcttagaaccaatagtataaccaagagcaaagcaagtaatacataagctgatgatggctataaaaagctccgttgtaagcataagcacaaacctccttgatagatttccaagtcggatttctatgtaaacagagctataactctctgatggaggataaccgcctaccgtgtagggtagcaccacatagattataacagttataatttgaaaaagcaatcgcattgcgagcgtttgttggcaaactgaatatggcacattttgatcgtacacatctggcaggcagctatgtgtcaaaagaacagccacatagcaagccaagaaaatctggcaggattaagataatcagttaaataatttttaaaagaataaatgcaagaaaatttttgtttgacaattttcaaaaagaaaaatataataacttctaaacgagtagcagactagcgtaaatccagttttgctgctcgtttttttgtgctcctgctgtcgtacattatgaaaatatatattgcattttaaagtgtgtagcttatcagcgtaagtccagcttatgaggtaagtgcacactttttttatgcagaaaaaggaggcagaatcctctcctcaccaaagggttcggattttgcttcgcaaaacaaggaggattataaaatagcaaaaagaattattacaatcagcagagagtttggaagcggtggtcgatttatcggtgaagaagtggcaaagaaacttggcattgcatattatgacaaggatattattggacagattgcagaacagtcaggcttatcaccggagtatattaaggaaaatgctgagttatctccaaagaaaggcttatttgcatatgcatttgctggacgtgacattacaggaaagtccatagaagatatcgtatatgaagcacagagaaaagttattttggagttggctggaaaggagccttgtgtaatcgttggaagaaatgctgattacattcttaaagacagggatgatgtgttaaatgtgtttattcatggggatatgccggaaaaaacacagcgtatcatgggcttatataatgttgaagagaaggaagccgtcaaaataattgcggacacagataaaagacgtatgacaaattataacttttacacggagcagagatggggaaaagccagtaattatacgttgtgcctgaacagttcacagcttggatatgacaggtgtgagaagataattctggattgcatgtgattttatcatgaataattcaggattaatgaaaaatagtgaaaaaatagtgaaaaattaatggaaaaaagcttttcttttggatataataatatttggaaggaaggtttttatgattaaagtaacattaacgaacgagattttaagatatattacagaaattgagcagaacagatataaagtatcgtcagtgaaactgtcctcaacagttatgaacaggcttcgtaaaaattcaaagaaaaaaagttcttatgcctcgaataaaatcgaagggaatcctttgtctgaaaaacaggtagatgaagtgatagaaagtgatgaaagaatgcattatctgaagccagaacaggaaatccgtaattactttctggcgttaaattatctcgaggaaaaggtaaataaaaatgaaaaattttcaaagaagctaattttagatgtgcagaaactggtggaaaagggggcttccaaagaaaaaatcggactcagaggacctatgccaccaggagtcctgtttgctgtgtatgattctaagacaggaaatcctgactatattccaccagaatattgtgacatccaagggctattggatgagttgattgagtatgtaaatactacagatgatcatcctttgattgtggcagcagttgtacattaccaattagtgaccatacatccgtttgaagatggcaatggcaggacagccagattgttatcaggttatatcatggatttgaatgggtacggatttaatggaatcggatcattagaggagtattttgcatacgatattgatgaatattatgaatccatccagatgggacttcctgcattgtattattctggaagggcaaatccgccgcatccagagatttggattaattactttttgcgtatggttaaactttattccagcaaagtttttgatttacagttagcttccgaagaggaagatattgctggaggtctatcttttctgaaagggaaggaaaaggaactgttacaatttttgattaaaagttatcgaggagaatttactccaattgaagtcagcagggaattgtcagtaacaaataagacgattattaacagactggcggtattggtgaaaaatggatttgtggttcctatattggtcaacaagagaatccgatcttatgaattaagcgaatttaccagagatcatgaaaaagaaattatgaaagttatcagctgactaattatggaaaactatctgcaagcttagttcagataggggaagttattatgataagagtagtacaaaaaacagatataactaaagtagcagacatatggctggatactaatataaaggcacataattttatatctgctaaatactgggaaagtaattatgagctggtaaaagaaatgctgttacaggcggaggcctatgtgtgtgagagtaatgggaaaatacagggatttataggcttaaacggtgattatattgaagggatttttgtttgtgatagattgcagtcgcagggcataggaaaacttttgctggattttgtaaaggaaagcagaacgcaattaagtttaaatgtgtatcagaaaaacactagagcgatacatttttatcagagagaaggatttgaaattcagaatgaaggattggacgaagctacgggcgaaaaagattatgtaatgacatggcggtaatatgtgtatattccctataatgtattcagagataaatattttgatgttaaatgttaattttgttcaagacagcagatgcattctgcataatggaaaatatgattttgcaggcgacagagcttggaattgcttcgagtatagtttcaaggggctacgaaacatttgaaaaccgggatgggtcaatatttccaataagctagtagagaactccccaggaatatggtataacaatagtaatcataatcatgtatgaaagagacggattattttaatgagaaagactattgcatattaccatcttccggggctgtttgaattctatgagttgtatgaagcatttttgccggtatatcgcaagcacagggagtatttctatgactggtgcgggattggctcaatatatggtgcgcctgcagactgtatctggggcggcggacgaatcggttccggtgaacatggtgtgcaggaagttatgaatctgatgagtgaatatgggatatcggcaaggctgacattcagcaattcactgcttcgcgaagaacatttggctgatgaaaaatgtaatgcgttatgtaaggcacttaatgaaagcgaaggcatgaggaatgcagtcagcaatggcgtgattgtacattcagaccttcttgccgggtatataaaaaagcattatcccaatctttatcttgtatcatcgacaacgaagatgctgacggatttcaatgattttctggatgaagtaaaaagagaagatttccagtatgtagtgccggatttcaggctgaataaagcatttgataagctggcgaagctgacagataaagaaaaggataaggtggaattcctgtgtaatgagtgctgctggttcggatgttacgacagaaagaactgctatgagattgtgagccgccagaatcttggcgaggactgtccagaccatgtatgcgttgcaccggattcgcagaatggataccggttttctaaggcaatggagaatccggcatttatcagtgttgatgatatcaggaatacatatatgccgatgggattttccaattttaagatagaaggacggggacttggaagtgcgctggtgctggaatttctgttgtattatatgacgaagccggagtatcagatacatgtgagagaagatatatatctggataatatgctggatatattctaaaaatgttatgaaactaatatgattatataagacacagagcagatgtgaaaatgaggcaggtggtcagtgatgaaagagataataatcttaatatcatatgaaaatgcttaatcccttttttaacataattctgatagattcctgtttttgacagtataattgtgaaaaaagtccaacaaacggcttggttgagctattgttggacttttagttcattcggtggatgcgtaatgtttgttttttataatccttttgattttctggcgagaccttttaggttcctatcagtcatatattgataatctgtattaaatctaaatgtatcatgaagagtatctgtaagtgttgtccttgtataggcagggataaatccgttttctcaaacagttgtcacattcatatttctaattgttgatattatctcatcacaagtgaatttatcatcaagtttcttttcgagcagcctgtatataagtaatgagataaagcatgtaaggaaatgagcctcaattcgattatcatcatgcaggtaaactgagcgtgctttgaattctgatttcatgatgcggaaggattcttcgatttcccacctgttatgattgattttagcaatgacagcgggatcgtcatcaaggtttgtgcatacagcatagaatccatcatactttgcttcttctgcaatagtatcaggatcaagggcatagactttcttttcagcacgttgattattgaacttgcgattgctctcggatgaaagtccagcattggtacagacaacaaacttagaaagttcaaagcctttcataatctgttgttccaatggctttagtggtaactgttcattctggttgcctggattgatacagaatgcaagaggaatacctgacatatccataaacaaacccatctgaacgattgaattaggccgatgttccttacttaccccatactgctttgaaccatcctcggaatcaatgtcaaaaaagtagttcgtacagtcatagtagaggacaccggttttgcgtttaataattcgtttggaattcttgtatagtgttgcctgaatgttatcagattcttttgcaaggacatctaaggatctgtatatatgctgtaattcaaagttgggctactcataaagcattgttgattgctcatagcaggaaagtttggatgaagggaaaagaattcgtccatcagcagaggaatgtaatgtgaatcctagagcaaggtcaacgaagatgcgctgggcagttaaagtataggaaaaaatgaaacaaaaatgatacataaacatttgcgaaaatgtaatataaatgatacaatgcatgtatcagataagtttctattgcgcaaaaggggatgtaaacgatggattatatgattaataatgatgattttaacatattgattgaaacacagcagaaaaaaatgaaagaggatgttgcacagcaatatatttcggcaaggaaagcacttaagctaacgcaggaggatattgctaataaatcaggtattaaaagacctaatattactcgattcgaaagaggggattataacccaaccattgatatgctggtgaaggttgcggcaagcatgggaaagaaacttgagattaatttggtagataaggaatagagtaatagctaccagagtgtttatgtggaggtatggttttatgaatgatagcgagaaattagatttattgcttgataaagtgacagagatgaaagaagagttgactggcgtgaaggaagatgtcagcacgttgaaagaaaaagtggatgtgttagaggaaggattagctgatgttaagcgtgaaacggctcgtaccaatatgattattgataatgaaattcgcattaatattcagcgggtagcggaaggccatctggatttgaataggagcttacagggggctatgaagccgagcagtgagttagagatgctttcagttaaagttagaatactagaatcagatatgaaattagtaaaaagtaaagtattggcttaaaggaatttaatatttcaatagatataccagaagcaagagatatgtaatttgatttcatgcttctggttatttattttggtttaaagaaaaataagcgtaaaaaccacttccgcagctccgcacagtaacatgacaagaataggatttaactttactttgcggagcaggaagatagcgacaacaaagtatgcaatcatgcggaaggagatattggatattgtaagggttatggttccgcttaaaaagaatgcagagattataatggttaatcctgcctttgcaatcatagaaactacagcaggacgcagggaacctagagtgccttgaagcagagccatttttttatattttccgtagatgaaagcaagcaaggttacaaatatacaggaaggcaggatgcatccaatagtagcaacaatggcaccaagaggacctgcaacctgagtgccaacaaaggttgcagcattgactgcaatgggtcccggtgtcatctcggctatggtgacaaggtttgcgaatgtatcaaaagtcagccagttatggagggttatgacttgttcctgaatcagtggcattgcagcatatccgccaccaaaactaaaagcaccaatttgaagaaagcttaaaaataattgtaagtaaatcatgcctgtgcctcctttttcttttcataaattagagttcgtacaaatcccaatattcccacagaaagaataatgaatatgacattaatatcaaggaaatagctgatgcaaaagctgataatcataatgataatattcatcaaatcttttgttttcacaacatttttccccatatcataaacaacggatgcgatgactgcacctacaccggccttcataccagacagcaacgcggcaatcatcttgttagtagaaaataaattgtaaaatacagatacaatggatatgatgaccattggtgggataattgcaccgaaaacagatacaagtacgcccggtataccagcaattttatagcccacaacaatagaaccattgacggcaatggcaccaggggaggactgtgcaatagcgaccaaatctagcatttcttcttcatcaatccaatgataatgatcaacaaatttattctttaataaggatacaatgacgtagccaccaccaaatgtaaatgcgctaagatacaacgttgccagaaataatgtcataagtatgtgtttctttttttcctttttgttatgctgcattgtgaatgttcctttcttttgaatttttgttatactcctcaaagctttttatttactaataacctctaaaatagaataatccgtcttgacatataaatcaaatagtataattatataattacatataacaaaaacattatgtataaggattaaaatcaaaataaaaaattttaagaggttaaagaataatgggattaaggcagctgcgtatatttacagaagtctatcaggaaaaaagcataacgaaagcagcggataagctgcatattgtacaacccagtgtcagtctggccattaaagaattagaagaggaatatgggattaaactattcgatcgaataggacgaggaatctttgttactgagacaggagaagcattttatgaatatgcctcccatattatttcattatatgatgagatggagaataagatgaagtctcctagtgcaccctttcaaatcaatatgggctccagtattaccataggttgttttattgttcctcatattgttgcgcgttttcgtgatatttataagaatggtgagattaatgtacgaattcaaaattctaaacaaattgttcagggcgttatgaaaaatgagatagatattggagttgtggaagacagagtggaagatgataaattgatttctattccgtttttaaaagatcagttactctttgtatgcaataacagcaaccaactaacaaagaaaaataaaattgaactggaggatatagcaaggcaaccattatttatgagagagccgggaagcgccagccgtgagatagcagatggtttatttaaagcaaatcaaattaaaataaatatcgcatgggagagcataagtaatcaatctattattcatgcattaaaggaaaatgaagggattacagtgatttctcataagcttgtggaaaaagagattgcagaaggaagcttatatgtgctaccgttatatccagaagaatttaaaagagagtttatattaatatatcatagaaataagtatctgacgccagctataaagagcttgattggtctgatttgtgaagaaaaaaaggaaagcagacatattaaaacagattttttaaatttataggagaagaattatgccaccaatcagtgtattgataaaacccgcatctggaatgtgtaacatgtcttgtgaatactgcttttattatgacgagacaaagaagagagaacaggagtcctttggttttatgtcagaggaaaccttgaaaaatgtaattagaaagacaatgcttcgtgcagaaggaagaataacttatgcatttcaggggggagagcctacattacgtggaatagagttctttcgcaaggcagtggagcttcaaaaaaaatataataaaaatgatataagtgtgacgaatgctttgcagacaaatggattgttactagatgaggaatggtgtcagttttttaaggagaatcattttttggttggtgtgtcaattgatggaataaaagaaattcatgataaattaagacacaacaaaacaaaaggaggcacatttgaaaaaatagagaagggtattgaactgttagaacattttgaagtggaatataatattctgactgtggtcagccatgatgtggcttgcaatattgagaaaatttatcgattttacaaagaaaagggctggaattatcagcagtatattgcctgtttagatccattaggagagaaacggggggaaaatgaatattcactcaaaccgcaagaatatggtgtgtttttaacaaagctgtttgacttgtggtatgaggattatctaaaaggtcagcagccatatattaggcagtttgagaactatgcaggaataataatgggatatgcgccagaagcctgtgaccagcgtggaatctgttctatacagaacgtggtggaggcagatggaagcgtctatccgtgcgatttttatatgctggatgagtataagcttggtaactttaatgaagatcgactagaagatattcataatcgtgccgtggagacggattatatttctcggtcaaagaagaatgacagggagtgtcaggaatgtaggtactataaagtatgccgtggagggtgctttagaaacagagattatcaggagaagttagatgcttatcgaaattatttctgtcagggatatcagtatttttttgatcattgtttaacacgattagaaaaaatgtgttatacgatccggtaatggaactcagaaaaagagagagttcgaagataacttgaaatagttatctcagctttttccacttattaggggacatgcccttaatttttgaaaatgcatgacaaaattgagaagaacttttatagcctacggcttctgcaatatctgcaatggacttatcggaatgcagatatacacaggctcgcttaatgcggagttggtgtacaagagcagagtatgagctatgaaagttctttttgattgttcgggaaagatattcataggagatatggcagttcaaggcacagtttcgcatagaaatatcttcggatagatgagaaagtatatatgaataacattttcttgcaatgggctcatagttcttcaaattatgttcgtgaacggcattacagtagaaattcagtagattatctcgaatattgttaatagtatattcatctgtggcagattcgattttttcagcaaaggcagcactaattgtgcgcacgtagacaagaggtgcaccaccttcttcagcagcacgacaagccagggtattcatagtcatggtcagattttttatcttgcgaagtgggctgcctacttcataatgacttatgtttgaaaaaagagaaacattcttatacggctcaagagcagtctggtcacctgctgtgattgcctcggtaatagcgtaggagatgagagcgtgccttataatttcttcatcatcgctataggcaataatggcttctgtgctggacaggaaatctatatttggttgacttggttttgagatttttgaatgattttgtttcatatgttacagctccctggtcttatagaagtactatctgcatttataatatcaaaaatagaatactaatgtcaaatacagacaattatatgttttaatttttgataaaatgtgtattgctaagaagaacaattattttcataacgtgacaattcagaactcaatttgcagagcgctgaacagttttattataggaggtttattatgtcacagaaaagaccacacattattatatttaatccagatgagatgagagcagatgcattgcaccatctgggaaaaaatcaggcagcagttacaccaaatcttgataagtttgttcagtcggatgcagtatcctttgagaatgcattttgccagaatccagtttgtgtaccaagcagatgtagcttctttacgggattatatccacatacaacaggacatcgtacaatgacttacctgctaagaccaggtgaaacaagtatgtttaaggaattgaaggatgcaggctattatgtatggatgaataatcgtaatgatttgtatgcagggcagtattcaggctggatggaatcaaacgcagatgaaatattttatccggaagagggaagcagggcacctaaggctatgaatgagaatcagcgcggagaggaaggtggaaagtattattattctcattatgaaggacagctaaatgtagatgaaaatggtaaaaattacacctcagatgatgagacaattgatgcggcaattgacaaaatcaagaattggaaggatgaaaagcaaccattatgtatgtttttgggacttttttatccacatccaccatatcaggtcgaggagccatatttctcagccattgatcggagtaaattaccagataggattagatttgaggattgcatagataaatcaaagatgttaaagcagtatcacgaatatcagaatcttgaaggtctgaatgaagatgagtgggatgaaattcgtgcaacctatgctggtatgtgcatgaaggttgatgagcagtttgggaaattggttcaggcgttaaaggatgtagggatttatgacgactgtgcaatttttgtcatgagcgaccacggagatttcgttggagattatggtatggcagaaaaggcacaaagcagttttgaagattgtctgacaaaggtaccatttttagtaaaacctccaaagaatataccagttgacgcaggtgtttcggattctatggttgagcttgtggatttctatgcgaccgttatggacttcgcagaggttgtaccatctcatgagcattttggaagaagcttacgtggagctgttattgatagaagcaaacaggttcgtgaatttagttgctgcgaaggtggaagacgtcaaggagaattgcagtgtgacgaatatcatcagccaggaggtagaacagcacagccagcggatgtttactggccaaagaagatggcacaggcagatgatgaggcacatgccaaggctacgatgctgcgtactaagagcttcaaatatgtgagccgtattactggtgaggatgaactgtatgatttaaagaatgatccgcaggagaaaattaaccagataaataatatcgaatataaagaaattctgttgcagcttaaagataagcttctccgttggatgcaggaaactagtgatattgtaccttttgattatgatagtcgcatgaatgagactatgctttggaatcttgtgaagggaatggtgccagcagataaggaagatgatgttcgaggaaagattagaagtggaatcagtatcggagcattatttggatattgtaagtcgatgagataaatgagattaaaatatgtagaagttagatttggcggatatacctcttttttctatttttggctttattttttctatttattgaattattaacatgttactatgaggatagtattgaagataataggtaattatagaagaatacggaaaggaaagaaatatatgagtaaaaagcaggcaatgaatccatatcttcccttatgggaatatgtacctgatggagaaccacgtgtttttggtgacaggttatatgtatatggaagtcatgacgaggcaggggcagaacagttttgtgtgggagattatgttgtttggagtaccccaatagaggatttgggcgattggagatgtgagggaatatcatattcctatgagcaggctggagcagatatcgatgaggcaggaaatcttgctgcaccagattgtgttatgggagcggatggaagatattacttatattataatcgcggtgcaaggatgagctgtgaggttgcagtaagcgatgagccacagggaccatttacgtattatggtaatgtgacattttccgatggatcagaacccaaagcaaagctttttgaccctggagtattagtagatgatgatggcaggatatatctgtatacaggatttgttccaacgccggaatctccttggattaatgttgctggaagatatagtcttgcatttgaacttgaaaaagatatgaagactatcaagcagggtccatttgaattgttgccagggtgtcttgcttcaaagggtacagaatatgaagggcatggtttttatgaggcctcctcaccaagaaagattaatggaaggtactatatggtttattcatcagaggtaagccataatttatgctatgctgtatcagataagccgatgtcagattatcattatggtggaatactaatatctaatggtgattttggatataaaggaaatgaactaccgaagatgccttatggaaatacacacggaggacttgttgaaataggtaatcagtggtacattttctatcatagacagacacatggaattgagtgctgtcgtcagggttgtgcagaaaagataaacttgaatgcagatggaacattctcacaggtggagatgacaagctgtggattaaatgatggacctttagaggggcttggaacctacagtgcagcttatgcttgtaatattattcatgaaagcattggaaaagaacgttacagtataagaaagattgtcagaggaacacaacctcatatatttgaagaaaaaatagatgattacaaagaacataatattcagtatattgccaatatgcagaataaaacaatagcaggctttaaatattttcatctgggaaaggcaaaaaatataagcttagaggtttccaccattaaaaagtgcaggatgaatgtgtatatagatgaagagtgtactgaggaaatcgcgagtatttcaattggcaaaacaacaggttggaaatcatttaaaggaaaatttaatggacctgaggggatatatcctttatattttcaattagtaggagaagcttctattgactggaaatcctttacattacaataatataggtggattatgaataataataatgagatttttgaaaatgctcccgtaggtaaagctgttgcaaggatggcggtgccaacgattatatcgatgttagtcgttgtcatatataatatggcagatacattttttattggtcagacaggtgatgccatgcaggtagctgcagtatcaatttcagctccggtatttactatacttatggcatttggtaatctttttggaattggtggaagttcagcgattgcgagggcattgggggcaaaaaaactggaacgtgcaaaacagatatcagctttttgttgttatgcatcaattggaataggcgtatttataatgatattttgtttgcttggaatgagcaaaattcttggtatgattggtgcatcagagaatactgtggattttgccagggaatacgtgacaattattgctatgagtggtccttttataatctttagttttgctttttgcaatatcttaagaggagagggtgcttcaagacaggctatggttggtaacatgattggaacagtaaccaatattgtgctggatccagtactaattcttggctttgggatgggggttttgggtgcagctgtggccacaatgattggtaatatattggcatgtgtatattatgtaagtttttttgtcaggaagaaatcaagtctttcaattaacattagcaatttttcaattaaggatgggattgtctttgatattgtaaagattggagtgcctgcatcacttaataatatattgatgagtacagctcagatagttcttaataacgcattgattcagtatggcgacacacctgtagcagctatgggagtggcatcaaaaacaaatatgcttgttgtgcttttgcaggtaggtctttgttcaggaattcagccactcataggttatagttacggagcaaaaaattataagagactgaatcaggttgtcaggtttacagggatatgtgctgtgattatgggtacaatccttactgttgttatattttttatgaaaagatatttaattacagcatttattaatgatgaggcagtaattgaaataggaattaagattgtaattgcactgcagctttccggtccgtttttaggaatattatttttgtgcattaatacattgcagggaatggggaaagcattaccatcgcttgtgttgaccttctgtcgtcagggacttatttttgttcctttgatattccttttagatagaatgttgggcttggatggggtaatatatgctcagtcaattgcagattatgcttctattattatttctggggttatgtttgtagtagcgttaaagaaaatagaaaaaaggtgatacctctttaatttaaaggggtatcacctttttttataatgtttttttgtattctgttggtgtgatgccaaaggcttttttgaaaagttttgtaaaatagttccaatcaggaattccaatatatagagaaatctcttttatggataatcctgttttttcgagaagactctttgctaatatcatacgttgttcagtaatataggtggatagagatttaccaacttcttctttgaattttcttgagatgtagcttggtgagaaattcacggcttctgcaattgagttgagagatatttcttcactaagattcaaggatatgtaattaataatcttacacatgttaggactatactgccttgtagcatgagttctacataaagcacagtagtcaacgagcatttcatcatatgtgttgttgagctgttggtgagtggtgcacaaagcaagcttttgggcaaagctttgacttatttcatccagatatataggatgtattcctgtaatctgggcagcctttcgaaataatgtattagttgaaaacagcaacgagcggtgagacagcagacgatttgtaattctgtggtccatatctgaatctcgaaagaatttcgcttccgaaaaagctttttcttcgttgccctctgttatatattttaagagtttctcttcatgggaatacatttcttctgcaatcttagctctagcattaatatcttccaaaggaataataggaaaattgccactatttatttgctccagattgtaatcgtgtactgtaggatctgtaatttgatgtaaaaaatatagaatattctttgcgatggcaagagcttctattcgcatgatgttacaaggaacgtccttgagcagatacttgaaatcttcagatgcagtcagagtaaaattgttatttatctgaatttttgcgtaatcattttcctcatagggcaatgaacgaaatggtccaatagaataaaagctattgttatcaggatcgcttcgaaatgtaatgctcgtcattagtagaggatcctttacaatagtaatttctccaaactttaatgagcgaagtataggacgtattaggtcatatagctgctctgaatttttaagatgtgttcttatgcctatatctaacgcagataaatctgcttcaggtccatcaaaatagttgaagataattcctcttgagtcggcgaatgtatgctgtagaaattcaaatatttggttatttagcatatatctactcttcctttcaggatgttttttatataatttcataaaaaagaccattaataatctattgatttataaaattatatcatattttactattttgcaacagaatttttctatttttgaaaaaaagtaacatgttaatatatgcccataagataaatacgacagcacattgcacaatatagtgtgccaagtataaaaaataatcaatgaaggaggaaaatatatggcttcaaaaggcgaagcaattttggaagtcaaagatatgtgtaaaaactttggagtaacagtagctttgaaccatgtcaattttgtattgaagactggagaagttcgtggtcttattggagaaaatggaagtggtaagtcaacagtttcttctatcgcatctggaatgcagaaggcaacaagtggtgagatgttgtatcttggaaaaccatgggcacctgcctctgcattggaagcacaacagaatggaatatgtatgattgtacaggaggctggtactatagctggaattcctgttgcagataatatatttttaggacatgaaaaattatttgcaaaaggaccatttgttaaccatagcaagatggttaaagcagcgcaggagctacttgatagtcttggcattgagattgatgcttctgtacgtacggaacgtcttgatttgcagcagtgtaagcttgttgaaatcgcgaaggcaatgtattggcagcctaagattcttgttgtagacgaaaccacaacagcgttatcacagacaggtagaaatcttctttataagcttatgagaaaaatggcagatgaaggcggaagtgttatgtttatcagccatgacttagatgagatgatggagcattgtgatgctgtaacagttcttcgagatggaaatatcattggttccttggataaggaagaattcgatggtaataagatgaaggaaatgatggttggtcgagaggtaagcggaaattattaccgaaatgataatgattcatatgaggatgagataacactcaaggcacattgtattacaacaagaaaagatttactttgttttaatctggagttacataagggagaggttcttggtatcggaggtctgtcagaatgtggaatgcatacagttggtaaggcacttttcggatatgaaaaaattcttgatggaaaggtaacagttggtgcaaagcagacagttgttaagaatcctgagacggctattgctaatggtatcgcatacacaagtaaggatagagaccatgaatcgttaggtcttgcgggttcaatcagagataacatcgcttcaacaggatactatttcaatagaatctttggaccaataatttcttttggaaaagagaaaaaatttgttcagaatcagattgatacactggaattaaagtgtgcatcccagtatcacagtgtgaatacactgtcgggtggtaacaaacagaaggttgtatttggtaaatggataggctctgaggcagatgtgctgattcttgactgtccaacaagaggaattgatattggtgttaaggcatcaatgtatcagttgatttacaaaatgaaaaaacagggcaaatcaattattcttattagtgaagagcttccagaattgattggtatgtcagatcgtattctcatcatgaaggatggaaaaattgtgcatgaagcaatgcgtagcgaaaatccaacagaacatgatttgattaattatatgatttaggaaaggaggagctgaatatgaaaactacatttcttaaaattaaagaaagccgttggaccagccgcctgctttccccaataattttattgttaattatcattgcattttcaattgcaactgatggaagattcagtagctcaagaaatataacaatgataatccagcaggcattgacggtagcaacagtagcaacaggagcagtatttatcttctccacaggaaatgtaaatatttccatgggtgctgcaacagcacttgttgcaacaatagcagcaaagatatatttaaaaacatcatcagttccgataatggctgtttcagccataattattggcgcgatggtacttgcattaacagcattgttaagtacatggcttaatgtcagagttttgtatgtaacggtagttatgatgacacttttggcatcaattcagaagagtattttgggtagtgaaacaattacacttccatataaaatgacaagtgccttaaagaatgcagaggttccattaatgatttttattggcttctttatattttgtacgattttattccattttactggattaggtcgtaagctgagatatcttggaatcaatgaactatgtgcagagctcactggttttaaaaagagcagatatctattgctgggttttattattgctggtataggtgttggagcaggtgctgttattacaatcattagaaatggttctattacagcagatacatgtgcaactctgaatatggattgtatgcttgccattgtacttggtggtatgtcgtgcttcggtggtagccgctcacacacattttcagcggttgttggtgccgtaatggttactgtattaaataatggattgttgatgttaggtgtatcaagtacattagttcaggcaatcagaggtattgtatttattattcttgtttgtgcgagtcaggcaagacctaaggggcttccaagcaaggaaggttaaataaaataaaaaataaaggagaatttttatgaagagatttaaaaagcttttatgtgtagttttagcagtaatgacaatgtcagtattgttcgcaggctgcggaaagaatgatggagaagctaatgattcaggaagtgcagaatttgaaaaaattaaggttgcatatgcaacaaataatgttgatgaaacatttgttacaatgaagaatgcttatgaaacagtagttggacctacattaaacatcgagtttatgttctcagaggcattaaaggatactggtgcaatgacaacatttattgaaaatgcttatgcagcaggttgtcagggtgttatcgttgacctttctagcggtattgatcaggcagcagcagtatgtaacgatttaggtatgtggtttgttggtatctcatcagcagatgcagcagaaaatatggaaatggaaaaatatgttagtgttgttggcgctggtgcagcaggttatggtgcatcatatgcagatgcaatcaagtcagttgttaatgatggaaagaatcacagcattcttttaatgtcaggtgcagcatgctacggagcaacatcattcatcgaaggtacagctggttcacttaaggctttacaggatgtttacggtttaaagtacacaaaggatatcaaagagcttgcaacaacaaagacacagattgatgcagaaaatgataagggaatcaagattacaatcttcccaggtatggcagatcttgctacaacagtttcacctatattacagacaggtaactatgacgtattagtaggtacatcaaatatctatgattcattaggtgttgcagttgatgaagttgaaaaatcattaaaaatggatattaaatttatcacaagaagtacattctcagatgcaattacagcagctgttaatggtaaggattcacagggaagcccagtaattgatgcaattgtttgcccaggtacattcgaaagaattggcgcagctattatgattagaaatgcttatgatggatttgctgacaagatgcgcgcagatggacgttgcagctatgtttcaaagaacgcacctttagcagttgcaagtgtagatgcatataatgcattggttaaggaaggaaatccatatgcatttatgacaacagaggatattctttcattaacaaataagaagaatccagatgttacttggaagacaatagatgattttggtggcaaattaactacacagtatattttagaaaaattcaagtaggttttagcagataaaggatgaaagcatatgaagagtaaaaagaatttattaaagttttttaaaggaataggaattgcaatagcactgcctgttgccgtgcttatcatcatggaaatattaattggtctctttgcagacggacatgtaattagctcgatgcttgacttcaagaacatggtgcgaggtgctggtatatcagctgcaatcgcgtttggtttatcaatgaacctgacaagtggacgaatggatttatcacttggttcacagagagttgttgcaacaattgtcggtggtatcgtagcttcaaagcttggccttggtggtgcatgggtattattgttcgcaattatattcggtttaatatttggtggaattgttggtttcttatatgtaacacttagaattcctcctatggtattaggtatcggtgttgcttgtatctatgaatgtataggttttggtcttacagatggagtaggacttcgtcttgttggaacaaagggagttgaaatattatcaaatgtaaacttcacacttgcagtagttgcagtaattgtagtcgttatgatggttactatgacatatacagtattcagttataagttcagagctgtaagaggagcgcagcagatagcaaagaatgcaggaattaatgttttcgtgaacgtagcaatatgctacacagttgcaggtattcttgtagcaatttcaggagtattagatgcagcatttgcaggctctatgacagcttcaatgggacttactagtaatggtgttgttatgcagcacatgttccctatgatgataggtggaacattcctttcaagatatgttaatcagtcaattggtattatctcagctgctgtagcggttaagatacttggaatgggtcttacatgctttaacttatcagatgcaacaagtggtgttgttaatatggcaatctttattgcatttctcgtatatcaggcaaatgcatacaagattaagcaggcaaaaactgataaattaagaattgcagaagcaaaagcatataaagcagccaatggtttagcttaatgtagattaaaagctctccggcattgtcggggagctttttgtttaaggagtgatttgaagtgagaaaaagtattttattgatgaaagagtggtcatttaccagactatccaagtcaattcttattccagaagaagcgaatgaatataatacggaaatggtttctctaccccatgtgtggaacaaggaaaaaccagaagaactaggatgctgtttatacacgaagcattttacagttaacaagaactcagaaaagaattattttattgcatttgatgcagttggtggtgtggcaagagtttttttgaatggtggatttttaggagaacatcgtggtggatactcgagattttgttattccatgaatgaatttataaaggatggagacaactgtttacaggttattgcagataatacaagatatgaggatgttaatccattgattggggatttctcatatttcggtggaatctatcgagatgttaatctgattgagacagaatacgtatatattgatccaacgtattatggcacatctggaattgatattaatgcaaaagcagacggaacaatacaaatagctgtcaatgtagctgctgataataaggttgatttggtgtgtaaaatactaaatcaggatgacgtctgggtggctggaaaagaacagaaagcaaatcttaatcaactagagttaaaagtggaaaatccgattttatggcagggaaaagaaaatccatatatgtatcggtgtatcgcagaattaagaattgaaaatgagatctatgacagtgtagaattgccatttgggtttagaaatatagaaatgaagccggaatcaggtttctatttgaatggagaacatattaagctgcatggagttgcaaagcatcaggattttgaaggaaaagcatgtggaacaggtgcagcagaacaaagaaaagatatggagctgatagaggaaataggtgcaaatgcagtgagactttctcattatcagcatcccgcatatacctatgatttgtgcgacaaaatgggatttattgtctgggcagagatacctatgcttgcaatgcctgatggaaatgaagcaattgtagaaaatgcaaaggagcagttaaaggaattgatactgcagaataaacatcatccatcaatatgtttctggggtgtgcagaacgaaattgctatgagaggcgaaagtcagtttacatataatcatgttgagaagctgaaccgtatagtaaagagcttagatccaacacgtcttagtgctggtgcgaacctatatagcgtaaaaaatgatagtccattgaatttcattaatgatgcagtgggatataacatttattttggatggtattacggaaaattaacagattatgaagactttttaaataagtttcatgaggagaatccaaatgtcagccttggtatctcagaatatggtgttgattgcaacacaaagtttcatagtgaggagccggaatgtaaggattactctgaggaatttcagtgtgtgtatcatgaggctgcatatggtgcatttgagaaggatacaaagctttggggaagctttgtgtggaacatgtttgatttctcaagtgccattcgcgacgaaggaggagtgaaagcaagaaattgtaaaggacttgtaacatatgaccgcgaagtaagaaaagacagtttctactattataaagcaagctggtctgatgataagttcgttcatataaatggaagaagatttgttaatcgctgtggtgacacaacgacaattactgtatattccaacgaagagcaggtagaactatatctgaatggagaatttttttcacgaaaaagtggaaagagaaaatttgaatttacagaggtccctattgataaagaaacaaaagtaactgcaaaggcaggagactgtgtggatgaaaccagtatatgtaaggtggattcgccagacaagagctatacttatgaaaaaaagggacaaggagctatggttactaactggtttttgaccgatgccggacagaaaaatctgtttccagaggattattattcatttaatgataaaatgggagatttgtttgctaacccgcaggtgacagctctcttggaagaggagattacagaaattgcccatgatgaacgtgcacgttcttttggtggaatgccccttttaagagtattagattataattcaggcttgtatacagaagagaagctcaagaaactaaacgaaaaattaaatcagattaaaaaggagaaataatatggtagatttgaaggcgaacccatttaatcttaacgatgaacagattaaatgggttgaggatacatataatagtatgtctttagatgaaaaaattggacagctatttgttttattaaaggcaattcctggtgttaatgaggaattgattaagggaacccttgatcagtttcatcagggggggcttcgttggcagggaggagataaggaaacagtttatcttcagaatacaacatatcagaagaacagtaaggtacctctttttgtggctgctaattgcgatgatggtggaattggtgcagtgccagagggaacctttgtggcaactgcagcagaatgtggtgctggagaaggcacagagaatgcatataacttgggttatgtaagtggtaaggaagcatctgctattggttgtaactggatgtttaatccagttgttgatgtatataagaactggagaaacacaattgtaaatacaagaagctttggttcagaggctgataaggtaattgataacgcaagagcatatattaagggcgttaaggcggcaaaccctaatatggcatgtactgcaaagcattttccaggagatggtgttgaagaattagaccagcatcttgttatgggcgtaaataatctttctgtagatgagtgggaagaaagttttggaaaagtgtatagaactcttattgatgagggacttgaagccataatggtaggtcatattgctcttccagaaatgagcagaaagttagttcctggtattgaggataaggatatcaagccagctacactttcaaaggaattattaacagatcttttaagagaagatatgaactttaatggactcgtgattactgatgcttcacacatggttggtatgagtgcaacaagcaagagatgtgatgcagttccaggtgcaattattgctggctgtgatatgttcctttttgctaatgatattgctgaagatatggcatatgttcgtaaagcatatgaagatggtcttttaacagaagaaagactagaggaagcagtacgcagaattcttggcatgaaggcgcatcttaatcttacagatgagtctgtaataattccagacaagaaggagcttgacaacatcggctgtgaagcgcatagagaatgtgcaaagaaggcagccgatgagtgtatcactcttgttaaggatacatataagaatcttccagttaaccctgacgaaaagaaacgcgtatttttagtatatgttggttcaacaccaacaacaaagggctatacaggagatcctgtgaagaaggtagttattgaagaacttgaaaatgcaggctttgaggtggatgtatgcccaagctattatgaccttgaggttgagaatggtgtcagtccaatgaactttgtgaaaatgttaaatcatgagccaagacaggcattcattgacactcacgattttgctttagtagttattaatgttaagggctatgcacaggaaaatgaagtgcgtgtaagatggagctgcaatcacagttgtgagcttccttggtataacgaggaggtgccaacaattggtatgagccttaattacacaaatcaccttatcgacgttcctcagttacatacgtttattaatgcatatgctcctaaaagagaacatattagagcagcaatcgaaaaaatgactggaaagagtgagtttaagggaacagcagatgagacagtattctgcggacgttgggatacaagattataaaattgtcaaaggagaacttaaggtatggtggatttaaaagcttttaacaaatctaaggacttcttgatttgtgtagacagtgatggttgcatcatggataccatggatattaagcatttcaaatgctttggcccatgtatggttaaggaatggggattggagcagtggcaggatgaaattctgaatcgctggaacgatataaatctctatacaatgactcgtggaatcaatcgctttgcaggtctttctatggctttatctgaaattaatgagaaatactgtaggattgaaggcatagaggaattcgttcagtgggcaaataatgcaaaggagcttagcaatgcttctgtgaaacaaatgatggaagagtcagaaaatcctatttttaataaagcattattatggtcattggcagtgaatcagggaatcaatgctctgaaggattatgaaaagaaaccgtttgaaggtgctagggaaggtcttagtgcgcttaacaaaaaagcagatattgcggtggtttccagtgcaaataaagaggctgtcattgaagaatggaatcgatggggtttaagcagcgatgttgatgtgctttgctgtcaggatgcaggaactaagaaagaatgtattgccaaattaaagaagcagaattataagtcaggtcatattctgatggtgggagatgcagtaggagatcgtcaggcggcggaaataaatggagtatatttttatccaattcttgtcaagcacgagacagaaagttggaatgaattagtagacattgcgctggataaattcataggtcttgattatgcagattatgagacacagaagaagagagagtttgaagaaaatctgaagtagatataaggattatagtaaacaataaataaggggctgttgcattaaaaaatcaaagcgataactgcaagtacacattcaattaacattgcaccgtaaccaatcatcttagcattgttttcattgtctaactgtttagatgttgtacctgatgaaataagtgagtggaaacctgaaacggaaccacaagctactgtaatgaataatactgggaattcgaaattgcctttagcatcaaatgctgtgaaagcatgtaactgtactgatggttagaaagttcaaagtctttcataatctgttgttccaatggctttagtgataaatgttcattctggttgccaggattgatacagaatgcaagaggaatacctgacatatcttatacagtgttgcctgaatgttatcagattcttttgcaaggacatctaaggacctgtatatatgctgtaattcaaagaaaaacataaaatgtacaaaaaaataagaccattactggtctgctggatatattctaaaaatgttatgaaactaatatgattttattaaggcacaaagtacattgctttgtgtcttttttgctgtctgagtgcaacttggcatgcttaaaatgcaacttagtgataagcctatagacatggggatggaaaaagtatatatatgaataaagcatttgtataaaaagaagaaagtaagggtgatgttttgaaattcacaatacaacagattacagacagcagggcagaggaagttctggtaaaatgctgtgattcacaggcagcctgggtggagaaggtaagaaaggtggtgtcggcgcagaatacagttggcgtgtataaaaatggtgcattttacaggcttgaattgtcggatatatattattttgaagtggttgacgggaattcattcatatatgggaacagtgatgtatatgtatcgcatgagaagctttatgaattcgagaagcagagtcagggaatggcgtttttcaggtgcagcaaatcaatggttctgaatgcagataagattgagtacataaaaccgtcagtttcaggaagattcgaagcggtgctgaccaatggggaaacggttattgtttcgcggaaatatgtatcggaattaaaacgcctattaggaatgtaaggagaaatgtatggatagattaatgatgtggatgaaacggtatgtgacattgtgtggaattcttatgatatgttcgttcttcatgtgcctgttttttgatccgacaagaaagctgaatcttgtgacatattttggacagtgtcttttgctggcgttcatagctctggcttcgctggcagtttactactcaaaggaagaattatcgcagaaagcatggtggataaggacaatattacatctgttattgcttgaaataatattgctgccactggcacatcactggcaattctggtttgatgcggaggacgcagttgtatatgccatatttatcctgattggaaaagtattctggcatatagttgattacagtaaaaatgtaaagacagcggcagatgttaataaaaaacttaaagaaagaagaaataatatgataaaggagagtaagattatatgaaaagattattatacgcagcagctttagctgcagggacatgaatattgcggtaatggtaagctggatatagtagaatggattaataaatacatgaagtaattctcaataaggaggggcgtatgtcggatattattaagatagaacatctgaataaatgttttggcgatgtgaaggcagttaatgacttaagtttccgagtaaagaagggagaattgtttgcatttttaggtgtaaatggtgctggaaaaagcacaacgatttctattatatgcgggcagttacgcaaggacagcggaaatgtgtggattaaggataaagaagcagacagggcaggcagtgaaacaaagaggctgctgggagttgtgtttcaggacagtgttcttgataaacctcttacggttaaggagaatcttaaaagcagggcggcgttgtatggaattactggaaatgcattcgaaaaaagactggcagaactggtggagatacttgatttcggggattacattaacagaccggttggtaagctgtcaggcggacagagaagaagaattgatattgcaagggcgctgattcacagaccggagatactgattcttgatgagccgacgacgggacttgacccgcagacaaggcttcttatatggaatgttattgagagacttcgtacagaggagaacatgacggtattccttacaactcattacatggaggaggcggcaagtgccggatatgttgtgattcttgataagggaagcatcgtggcagagggaactcctttggaattaaagaatgaatatgttcatgatacgatatctttgtatggagttacagaggatgagattaaagctttgaaaacagagtacaaagcaatccgtgatggttacaggattcaggttaagaacacacttgaagctacgaaaatgattgtgaaacatcaggagatattccgagattatgaggtcgtaaaaggtggcatggacgatgtatttcttactgtgactgggaaaatattgggaggtggtcagtgatgaaagagataaccgcacttgtaagcagaaacagaaaactcttttttaaggacaaaggaatgttattctcatcaatgataactccggtaattcttattgttttgtatgcaacatttttagcaaatgtatacaaggactccttcgtttctgcaactaaggacatgattgatttatcagacaaaataattaacggcacagtggcagcacagttagctgcagcacttattgcagtaagctgtgtaactgttacattctgcgtcaatcttacgatggttcaggacagagccagcggagcaagaaaagattttgatgtttcgcctgtaagtaaaacaaagatttatataggatatttcttatcaacagtacttaattcgcttatggttaatggaacagcacttgcattatgcctgctttacatattgaagatgggctggtatatgagtgcgtcagatgtaatatttgttatattggatatgattctgctggtgttatttggaagcacgctttcaagcattgtaagctatccgctaaagacgcaggggcagttgtcggcggttggaactatcgtaagtgcagggtatggatttgtgtgtggtgcatacatgccgatatctaattttagttcagggctgcagaaagcattgtcctaccttccgggtacatatggaacttccctggttaagaaccacatgctaaacggagtgtataaagagatggcggacacagggcttccgtcagaagcggtcacagtcataaggaacactctcgactgtaatcctgtattcaggggacatgttgttggcgtgtcacagatgtatttaatcatggctgggagtatagttgtattcggagcagcttatcttctgattatcatgattcgggagagataataatcttaatataatcttaatatcatatgaaaatacttaaccccttttttaacataattctggtagatttcaattatgttagaaaaggggaattttttatgttcgacaacagtataagaaaacatttgtcatcattccgggttataacaattggatttggtggattaattatattaggagcattgcttcttatgctgccggtttcatcagccagtggctgtgtaacaccgtttagtgatgcattatttacatctacatcagcggtatgcgtaaccggattagtagtactggatacaggaagctactggtctttatttgggcagcttgtaataattacgcttatacagataggaggtcttggcgtaattactgttgctgttgcattttctttattgtcaggaaagaaagtgtctttaatgcagagaagctttatgcaggaatctgtatcagcaccagtggttggcggagtagtcaggcttaccggatttatattaaaaggaacattcattatagaattatcaggagcattgcttatgatgccggtattctgcaaggattatggattgaaaggaatctggtttgcaatatttcattcaatatcagcattttgtaatgcaggatttgatgtgctgggaacagcggataatcaatttgcttcaatgacgacatatgcctgtaatcctgttattaatattacattgatgcttcttattgtgataggtggaattggatttgttacgtgggaagatattaagaataataagtatcattttaaaagatataagatgcagagcaaattaataattgttacaacagccgttcttataacagtacctgcaattatatttatgataaatgatatgatgactggaaacgagaaaatgcctgtatttaaggcactttttcaatcagttacattaaggactgcaggatttaacacggttgatcttaatgcaatgaaacaggcatctataatgattatgatagttcttatgcttataggtggttcaccaggttcaacagcaggtggtatgaaaacaactacatttgcagttcttatgggaaacatggttgcaacatttaagaggaataagaatattcatttttttgaaagaagaatagataacgatacagttaaaaatgcagctacgatagctatgatgtacattacattatttgttacaggcgcatttattataaatgtcacagatggaatttcaataggaaaatgtctttttgaaacagcatcagcagtaggtacggtcggattgacattaggtattactccacagcttggaatattgtcaagaattgttcttattattctcatgtttatgggcagagttggcggtcttactttaatatatgctgctttttctggaaatggaaatagctattcaaaatttcctgaagaaaagattaatataggataggagcacaatatgaaaaagaatgtattacttataggagccggaagatttggaaagcatatggctatgcagcttaatcagctaggacatcaggtgatggcagttgatactgatgagaacagaattaacgacgttatgaatatagtcacaaatgcacagattggagacagcacgaatgctgaatttttaaaatcattaggcgttggtaattttgatgtgtgtatggtgacaattggtaacagttttcagaattcgctggaaacaacatcgctgttaaaggaacttggcgccagatatgtggtatcaagagctgagcgggatgtacaggaaaaattcctgctgcgtaatggtgcagatgcggttgtatatcctgaaaaacacgaagcaaagtgggctgcagtacgctacactgcggaccatattcttgatttaatacaactggataatactcatgcaattcttgaagtggaagttcctgagtcgtggttaggaaaaagtattattgaacttgatataagaaaaaaatatggagtaaacataatggctataaagcataatgactcaataaatgtaaatgttgaaccagatattgtacttacagaagatattacattacttgtgttaggagattataaaaatctgaaaaaatgctttaaggtttaagattagggggcatgagcatgaagacgggattgattataataatactgatagttgtgatattattatttatggcagcaggatggtatgttatgaataagatagacggatttatgaacagaacaagaagaaccaatgacaaagatacaatgaatgctgtattgaatgaaagtgatgataacgaaaaaaagagatattaaattgaaaatgtgttattatatacaaaataaaataaggtggtaattataacggaaaagacatttaaaaaacttgtaaaagaattcttaataacaataggctttttaagtattgcaacagtaattggaatgctgcttatatatattggatttacagaatcaaatgttactatggtatatcttctatgcgtgcttttgatttcgatattcactaatggatatatctggagtgtggcgggttcgcttgtaagtgttgttctgatgaatttcttcctgacagaaccaagatttactttacatacatatgacacaggatatccgctcacatgtgttattatgcttgctgcgtcaatgcttacaggaactctggcatctaaactgaaaaaacatgttcgtatgtcagaacaggctgcttacagggaaaagacactacagttaagggctaatcttttaaggacgatttcacacgatttaagaacaccactcacatcaatatcaggtaatgccaataatcttatgtacaattatgataagcttgataatgatacgagagagcagatatttacagatatatatgatgattcagaatggttaatcagtcttgtagagaatatattgtttgtaacaagatttgaggatggaacagtaacgcttaatatgtctgatcagcttatagatgaagttattgctgaagcgttaaaacatattaacagaaaaagctgtgaacataaaatacatgtggattgcggcaaagaactgcttcttgtgagaatggatgtcagacttataatacaggttattattaatatagttgataatgcgataaagtatacacaggaaggctctgatatatatattaaagcaagaaaagaaggcagatatgtaattatatccgttgaagataatggcgagggaatacctgatgatatgaaagaaaatgtatttgatacattttttacctgtaacaatgaaattgcagataacagaagaagtctcggacttgggttatctttatgtaaaactattataaatgcacatggaagtgaactggaattaagggataatacaccacatggatgcattttcgaattcaaactgcagttaagtgaggtacatttaaatgaataaaacgcaggttcttgtagttgaggatgattcaccaataagaaatctcataacaacaacattaaaaactaataattacaggtatttaactgctgtaaatggagagagtgctatttcgcagactgcatcacataatcctgatataattctgctagacttaggacttcctgatatagatggggtggaagttataaaaaagataagaacatggactaatacaccaataattgttataagcgcaagaactgaagatgcggataagatagaagcacttgatgcaggggcagacgattatcttacaaagccattttcagtagatgagcttcttgcaaggttgcgtgtaacagtaagaagactgtcgcttatgcagacggatatgactcagaatacaagtgtatttgagaatggagatttaaaaatagattatgcggctggctgtgcatatctgaatggagaggagctgcatcttacacctattgaatataagcttctcatattattatcaagaaatgtcggaagagtgctgacatacacttatattactaagaatatatggggcagttcatgggaaaatgatctggcatcacttagagtatttatggcaacattaagaaagaaaattgaaaaagatgtcaattccccacagtatatacagacgcatattggtataggatacagaatgctgagagtataattatggatttcctcataaaagtgtaaaacggtgtataatataaccataaaatatatggaggttaattataaaaggggcatacgttaaaataggactaaatcaagagaaaccttataaaacaagggcttgaatgatttaagtcctattttttcatatcaattttgaggtaagaggactcaatactataattgaaattgaacgtttacatggtgtaaaatgaaagaaaacagataaaggagatttgaattatatgaattatattacattaaataatggagttaaaattccacagataggtcttggtgtttttagaacaccagacggagctgatacagctaatgcagtaaaatgggcgattgaggctggatacagacatattgatacagctaaggtttacggcaatgaaaaaagcgtaggcgaaggcatacgtatgagtggcattgacagaagggatatatttgttacaactaagctttggaatgaggatattagacagggaagaactaaagaagcatttttacagagcttggaagacatgggacttgattacatagacttgtatcttattcactggccagctaacggttatgagaaggcgtgggcagatatggaggacctgtacaaggctggcaaaatcaaggcaatcggtgtaagtaacttcaatgttcaccatcttgagactctcagtgaaaactggacagttgtaccagcggttaaccagattgagattcatccttattacgctaatattgaaaatgttgaatatgctaagaagaatggtattgcaatagaagcctacagcccacttggaggcaacggagcaggaacacttgaaaatgaggtgattattgcactggctgacaagtatggtaagacacctgcacagattgttttaagatgggagcttcagagaggaataattgtacttccaaagtcaacgcatcaggaaagaattatttctaattttgacgtgtttgattttgaattgtctgagggtgatatgaatgccataaatgagcttaacaagaacgaaaaacacggttctgacccagaaacatttaatttttaagaggaacttgacttttgaatcggtttaaaaatcgaaacacggcacaaagcaccgaatattctaatcaaccagtcccttgttcttccactttccgctcttccagcgcagcaccatgccgacagccctgatgcactcgtcacttgcgagtccgatgtaagcaccgactgcgagaagccccagatgcagtccgaagaagtatgttccgccgaccgccgcaaggtacatgaaaacggcaccaatgacaaccgggaaaacggcatcaccgcttgtcttcagtgcctgaccatagaccagattggtgactcttccaagctccagcacaacatcaatggcgagaagctttgtgactaggtttatcatctgtacatcattcgtgaagattcgcacaatgtagttacccaaaagcgcaaatgtgatagaaaggcaggatgccgtaatcacaccatagatagcggccttgcgagtgcccttatcgcattcgtcatactcctttgcaccgatatgccagccggtcagaatggcatttgcctgagctaaggcagcaccgatacagtacgaaaagttagcaatctgtgaggcataggaacgcgctgtgacgtttattccgtcagcatccatctggttcatgaaacgcactacaagagtcatggcgatattgtaaagtgcggtttcacaggcagacggaaagccaatctttataatctgtccgagaatttttccgggagctatgcgctcaggactgttctttgccttgatgagcacagcgcccattgtggcaacaataatcagattgacaatacgtgagataaccgttgcagtggcaacacccataacgccccagtgcattacaaagagaaaaacagcgttaagtataaagttaatgacatttccaataattgatgcccaaagtgactgctttgtgtagccgaaaactctcaggtagcttgaataaatcggtatgagagcatttaaaaagcaggcacctccaacaatgcgcagataagtatttgccgaatcaaaaagcgccggtgcaatgctgaccattttgagaatattttcggaaaaaacagccagaaaaacagccatgagcacacctattacagcgttaaatataagcccaagctgccttgcctgatatgctatacccggttttccggcaccgatattctgcgtcatgacagcaaccataccgcttgagatgacaccaaacatgatgatgaaaacggagatgtatgtatttgccgtgccgacagcaccaaccgcctggtcgctcacggatgacagcataagagtgtcaaccatgcctgccagcatgtaaaaaagtgtttcgaagcatattggaatggaaagctgtgtaagtgtttttctttgaacctgcatatagattttacctcatttataatgtatgtataccttgtgatattaacagaatgaaagcaaacttctcgttataagcttcatttgggagaggaagatataaagaagagaagcttgcatgtatcaatatattacattatcacaaataattcttgtattatttcaaggaaaaattgtactatttctactttatctattactaaatcctagagaacaaataaaaaaatgcacaccttatgcatgcaatatgttaaaatatagaacagttgatatgtaattattacagcaaacaaaccggatgggaattaaaagagactaaggaatatgtagaaaaatgtattttgaattaaaagaaaaccggccacacggcacaccggaaaatccgttcagtcaatatcatatcagtgatgtaaagcgtgcattccagattccggtacactggcatgatgagctggaaattatatatgtaaagcagggcaagctgcatgtgaccatatcaggtgaaaactatataggaagcccaaaggatacatttgtggtatctccgggcagtctgcatttcatgggctcgccgacaggagatgcagattattacacatttttgtttcctcttgaatatatatcatttcagacggatgatctcatggaaaaatcaatcctatcccctctcaaacgaggcagacttatgattagtcctcagataaatgatacagcagcagatatatgcgagcggctgatagagataaatgcacagatatcagggaaaaacgcagaaaacacagatgctgcaaatatagaggcgcaatttgaaaccaaaataactctcatcaaattcatccagaaaatgtggagcaataatctgatactggaaaatggcacaaatggcaccaacacaatagaaaaagaaatgataacgtatatccggcaaaactataaaagggaaatttcactgaaggaatttggtgcacagtttcatttgtcagaaaaatacatatcacgctactttaaagagcattttcatattactctgtcgcagtatatcaatcatctcaggctggagcatgctagacagctattggaggaatcagcaacttccgttacagaggttgcaatgtgcagtggatatcagaatgtgagctactttatacgcagcttcaagaaaatgtatggggtatcacctcttaaatacagaaaagcttcctgtataatttaaacataggtcaagagattaaagaaaaaatccgcaatttagcggatttttttaatacattcattaaataaaagcaatctgttatccttatcagcagatattttcaatgaagattgttcattaagcttcataaccaaagaaagaacatcactaaccgaatgctgcactggtcatatacgccggagcagaaggaagaggtgaaaaaagcacttgccgcaggagttccgaaagcaacgattcttacttacttttatccggaggtcactgtggagaagatgagttcatatcggaataagcattaaatgatatcgcataggcacaggaaatgtggtatactgcgcctatgtaaaaaagaatgtgttttgcaaatcggtatttatcatttgttaaggaggaatagtaaatggttggaagaatatatcatgtaggattgacggtttcagatttagataaatcaattgcattttatagagatatacttggacttaaatatcaaggagaaatcatgatggttggcgaagagacagataaaatgtttcaaaagaaaaattgtaaggcaagggttgcttatttgaatggttctgagaatattgaaacaccgcctgttgaattgattcaatttgtagacagcaaaatccacaaagaacaatcagacttgtttacgacatctatctcggaagtatgcttttatacggatgacattgattctgtctacaaagcccttatcgaaaatcatgtggagtgcttgtctgaaccgcagtatttcgatttcagggcagatggatttggggaaagcagagcgttttatttcagagacccggatggaatcattcttgagatgatgcaaccgttataaaaggacactaaatcggaagttggaggatacacgcatgaaaattgtaatcattaatggaagtgccagaaaaggaaacacgctgacagcaatcaatgcatttataaaaggagcatcagaaaagaatgaaattgaaatcattgaacctgacaaactcaacattgcaccatgcaagggatgtggtgtctgtcaatgctctaagggatgtgtcgataaggatgatacaaatcctacaattgataaaattgctgccgcagatatgattctttttgctacaccagtttattggtggggaatgtcagcacaattgaaacttatcattgataagtgctactgccgtggattgcagttaaaaaataaaaaagttg

SEQ ID NO: 8512 - DNA, 13652 bp, Unknown
  gut microbiota DNA sequence
aataatatttattgtaaagttgttaattattttaattatttattatatcttgtatataaattaatcgcacatatttacttgtaaataacttgctatcgcattataatttggcagtcaaaatattttaaattcaaaagaggtgtacaatgaacattttcaagaaaatatactgcagaagttttcagactgtattcaagattgcactgccatttcttccatacaggaagcctaaaattgtaagtgcgttatctgacattccatctgtacttaacaaaaagaagaaatcatgtcctgtaattattactgatcccggaattgcaaagcttggcattctctctatgcttacagatgtatttgacaatgccggcattgaataccatgtttatgataaaactgtagctaaccctacaactgataccgtggaagaagcacttgccatatataaagataacaaatgtgactgcataatcggctttggcggcggttcaagcatggactgtgccaaagctgttggtgtaagaattgcaagacctaagacacatctgtctaagctgggcggaatccttaaggttcactcaaagctccctctgctgattgcaattcctacaacagcaggaacaggcagtgaaactactcttgccgccgtaattgtagacgccacaacccgccacaaatatgctatcaacgattttcctctcattccaagatatgcagttcttgacccgaaggtaacacttacgcttcctccttcaattaccgcaactaccggaatggatgcacttacacatgccgttgaagcctacatcggaaactcaacaactccgggtacaagaaaagacgcacttatggctactgaattaatatttaacaatcttgacagagcatacactaacggttctgatacaacagcaagaaagaatatgcttaaagctgcttattatgccggatgtgcattcactaaatcatatgtaggatatgtccatgcaattgcacattctctaggtggcgaatataatgttcctcatggacttgcaaatgcagtaattctcccaatggttcttgaaagctatggagaatccatctatacgaagctgcatgaccttgcaattgccgccggtgttgcagataaggatatgccagatgagactgctgccaaagcatttatacaggcagtcaaagatatgaaagcaagatttaacattggcgatacaattcctgaaattaaagaggaggatattcctaagcttgcagggtatgccgacaaagaggctaaccctctctaccctgttccggttcttatggacgctaagacactcaaacagttctactataaacttatgaaagataatacacatgaaaatgaggtataatatggaagctacacaaatcaataaacttgtacaatcgcagcgacatttctttcttacaggtacaacacttgatgtaaatgtaagaattgatgccttaaagaaactatattcggcaattaagaaacatgagaatgaaatatttgatgctctctataaagaccttggcaaaagccagtttgaaagttatatgtgtgaagtcgggcttactctcagcgagatatcttatatgctaaaacatattaggaaattcagcagagagaaaaatgttccaacaccccttgcgcaatttcattccagaagctttaagaagccgtcaccacgcggagttgtccttattatgagtccttggaattatccatttcttctgacaatggaaccccttgttgatgcaattgccgcaggaaacactgtgattcttaaaccaagtgcgtactcaccttatgtcagcgatgttatatgtcacataataaaagaaatatttgaccctgcttatgtatctgttgtaactggcggaagatctgaaaacacatgtctgcttaatgaacattttgattacatattctttacaggaagccaggctgtcggcaaagaagttatgcgcaaagccgctgaatacttaactccggtaacacttgagcttggcggaaaaagcccatgtatagtaacagaatctgcggacttaaagctcgctgccagaagaattgtattcggcaaattcttaaactgcgggcagacatgtgttgcacctgattacatatatgttcaggacagtatcaaagaccagcttgtgaaagaacttatcaacgaaacaaagcgccagtttacagattctccacttaacaacaatgattatggcaaaattgttaatgaaaagcattttaacagaatatcaggtcttatcgataatagcaaagtcgttcttggtggtgcatcagatgcagattctctgcgtattgaacctacgataatggataatgttacatttgacgacgctgtgatgcaggaagaaatttttggtccgcttatgcctatacttacctttcactctgtcgaggaggcagtaaacactgttaatgcacacatgcacccgcttgctctgtatattttcactaagaataagaaagaagcccgttatgtaacctcaagatgcaattacggtggtggctgtatcaatgatacaatcattcaccttgcaacttccaagatgggctttggcggattcggtgaaagcggcatgggctcatatcacggaaaagccggatttgatacattttcacactataagagcattgtagataaaaaatgctggcttgacctgcctatgcgctaccagccatacacaaaaacaaataacagtttaatacatatgtttttaaagtaatcactttgcataaaaaacagcgctatattgcatacaatggcatacggcgctgtttttatgttaataatgttattaataaaataagattgaaaatgacttctcgaaaacttctccggcatcaagatgattactgtattccctgtccttaagctcccctgtaaaatctatggcatctgttcttccataccacggctctatacatacaaatggaacattttttgatttgcatgaccacagaccaaataccggtgtatcaaacttaacagtaacaaaaggcttttcattctttacaagacttaccgttcctgcctgaccaccctcaattataaatgcatctttttcaaagctgtcctcttgtattgtatattcatgattaattaatggcagctcatactcatccctcgccattaattgataatctcctataagatgatatgtaattctgtctgcatcaaatcttatcttgcagccagccatgtctgcatcattctctggtgttacaaaagccggatgaccacctatgctgaaatgcatcattacactatctttattgattactctgtacacttccttaatttcattgtcaataaggtgatactccagctccaatgcaaaatcaaaaggatatttttctttagtattttcatcggattcaagtctcataaccagcataccgtcagtatgcttaacaagtgtaaactccatatctcttgcaaatccgtgctgacccatttcatatacttttccattataaatgctttggttatccttatatttgccaataagcgggaaaagaacaggtgcaactcttttccatccttcgggattggcgttccacattctgtgtgtattgtcagttttacacaatacatctcttatttcacatcccttagaatccaccgtaacttttaaaatgttgttttctaatacatactctgccatattggcctcctttccgtacatgttttctttattgtacaccacaatctgatattttccaaatcaaaaaaagctgacacacaaaaagtgcatcagcctaaaaaaatatgcggataacaggagttgaacctgcacgtctgttgacactagaacctaaatctagcgcgtctgccaattccgccatatccgcgaacatttgctatattatcatattcatgaatatgcgtcaatattgaaactaaattcttttctagtattatatcttaaaaaagaagaataataaaaactacagaggtttatattttaccggcattatgaatttttttctgccattctcataacttctttccatgctggcgagaacagataataacctatcattgcaaacattccaaaactgaaagaaattgggaagcacaacattacccatgttccatcaaagtatctgttaataatataggcacttggaattctgaccgcccaaagcataagaatattgacaattgtagtataacgcacctttccagttccgtttacaatagatattatacagttaaagatagcaaaaaaccactgtgaaagcagcataacaacaacatgcctgctcgcatacatcaataccatttcatctgatgaaaagaaacgtattataggtttatgtatcattatgaaaaacaatccacaacttaatgtaataagacctgaacacaatggaattctccagtgtccttctttaattcttgagtatttcttagcaccgtaattctgtcctgaaaatgtagtggccgccgaagacaatccggtaattgctatgttagagcatcctgtaattcttcctgctactgcacctcctgccataaatatagcaccctgtgagttattaaaggtctgtaatgcaacatgtcctaatgaataaagcgaattgttaagaccaacaggtaagccaatagccagaatatccttcatcattgttccagagaatcttctcggcaaaaatgtaaactgtatctctggaaacttctttcttatataaacaatacttacaatccatgaaataaacatggcaatacttgtagaaagtgctgccccggctacatccattccaaaacctgcaacaaacaataaatcaaatactatattagaaacacatgacacaaccagaaaccatagcgaagccttgctgtctccaagtcctcttaaaattccggcgttcatattataccccagattaccaagtgtgcctaagaatacaacccttgtatagattaatgcggcattccacacatcctgcggcactttcataaattccagaatatacggtgctgcaaaccatccaagaattccaatcggaatacctataatatatataaatgttattgaagttccacatactgaaacaacctttctcgattccctggccccggtatattgtgaaataagaatagacacacctgttcctattcctaaaaagacacataataatacttcaacaggctgcgaactcgttcctaccgcagctaaagatgtatcaccacagtatttacctattacaagtgcatcaaccgtagtatataactgctgcaaaacatttccaataataatcggtatcgcaaacagtataatatttctcatgatatgacctgtggtcatatcaatctttcctttttgtgaatttgacataatatactccctattataaaataacctgtctgtatctgttatttataataatactgtaatcaagtcatatattctagtgatttatggcatggagtacagaaaaattgcacccacatgtttatttgtattgttaaattccctttaacgaaaatacttctcaatcactgcagccctctcaatccagctatgcctacccttacagcattcatacccgctgtcagcgatttcctgcaaatatttcgtatcagctaatgcacatttaaccttatccgtaattcgtgccgcaatacactcatcatatcccgacttttcatagtctcttaaatcctcaagtgaatagaacaacacattttcaccatctgcaaatgtattctcgtaaaacagcgaagtatcagtaagcgcaacacctccattaagcatagtattaaacactctgtcgtgtgcgcccttcttaaaccacggcattacattaagagaaatctttgtctggctaatcatatcaaggcacaccttggaatcaacgccgccatgctcaattatattctcatggtggttacattcgatataattataacctgcgccataagtatgaatcttaagtcctgaatcagccagtgcccttattgcaagctccctgtagtggaatcttacagcaaggtctgcatacatcatattaggcatgcagtcgacaagctgttcgtctgtaatatcagggaattccctgcgtaacgcattttccgccgcctcatcaatcgtctctgacggattgtctatcagatatgacagcacaccctcatagaaatctatatactcatcatccatgttatccagatgtttccttagtattcttttcggagtgtaattacctgtaaatataatatctatcggtctttccttcattgacaggtaattcttatcaggcattatacatctgttataattaagctctgcacctgctgtaagcatatattctgtgtgcacttccgggaaaaatctgtgcatgtatgcaacatggatttcgtcaatatcaagctggatatacttttcagggtgttttcggatatatttattgtaataaagcggatggtctacaaccacatttacaaccttaacacctgcccagtcccagaaattccagccatcatcacgatacaagccggcttctcctgctattccttcaaagttaaatgtaaacatataccattcatctgctctgtgagccttaaagaattccaccagtgcagaagaactggcctgctgcaatattaaattataccagaagacggagcagcccatcttctcccatacagcagccatctgctctgtaaagaattctaatgtttctactccgcctttaaataaaatcaatcttttcattattcttctctgttaagccataattgcatcaaatattccatctaatgcagacacatcaagttcctcagcctttcctgaatcgacaagtccagctacctttgcgtccattggaagctttgcaacagtcttgatatcgttagctgctgccacttcatcaatcttactctttccgtatatataatgaatattaccgcaatctggacatttgaaataagacatattctcgacaattccaagaaccggaatattcataagcttagccatattaattgccttctccacaatcattgaaacaagatcctgtggtgaagttacaataataattccgtctatcggcatagactggaaaacagtaagaggtacatctcctgttcccggaggacagtcaacaaacatacagtctgtctcatcccagtcaacatcttcccagaactgcttaacaacacccgcaataacaggccctctccatataaccggatcagtctccttttccataagaagattaagtgacataaccttaataccattctttgaagtctcaggatacattacagttccatcttcattacatgttaccctttcagtaagtccaaaagacttaggaatagatggtcctgtaatatctgcatcaagtattgccgctttctttccttccttattggctttgactgccagcattgatgtgacaagtgatttaccaacgcctcccttgccactgacaacagctataaccttcttaactttgccattattggcatttcttaatatctgtggtccttttcttgattcgcagtctgaactgcagcttgagcagcttcctgaacaattctcgctcataacttcctcccattattcattcatatatttttgttcaaattcttcgactggtataggctttgagaaataatatccctggaatatatgacaacccatctctgtcagcataataagctgtttgtctgtctctactccttcagtaattacctccattccaagctttccaccaagagaaataatagtctccagaatatcctgtcctttaacctcattctctgtagcacgcaggaatgccatatcaatcttaagaacatctgcacttatatcttttaacatattcaacgaagaatatccacttccaaaatcatcaatctctatcttaaatccataatccctgagagacttaattacctccatattcttcttaagatcagacataagtgctgtctcggtaatctctagctttaacatcttaggttcaatatcatatttcttgacaattgatgtaataacctcatatacatctataagataaaaatccttagtagatatatttacagaaatataatgaaccgtatcacccttcttcttccattcacttaatttagctgctgcacattcccacatatacatgtcaagcttatatataagacctgtagtctccagaatatcaatgaagaagaatggcgacagcaaccctctctcaggatgctgccagcgcacaagcgcctctgctccataagccttaccatgagtattaacctgtggctgaagaaacattttaaattctttcttctcaattgccccttcaaactcactgataactcttctttcttcaagagttctctttaacagcttatcatcatagtatgcaatattagtttcataattattcttaatagtctcgctcgcaataaatgctttatcacacatattacttacaggctcatcaacatcttcaatatcataaacaccaactacaacccttttcttaaatgatgcattgttgaatctgtcctgcatacttacaatactattctgcattatttcattcttaaaactgtccttcggcatacacacagcaaatctgtcattctggattcttccacatatatagccactttcagatgaagccttgataagccccgcctgcattttaataatctcatcacccttttcgattccaaaaagctcattaacaagcttaaaatctttaatattgctgcacaccagacaatatgtgtgattcctgtcgtttctcactacattggcagtttcctcatagaactgctccttattaagaagtcccgtgagattatcatgtgtagctctgaacttttcatattctaaaagctcaacagcttccgtacgatcattaaatataaaataatcacatataaaattatgcttatcatcatatacacgattatatgaaatatcgatgcttctcctctcatctcccacgctgattgtctgcctgaatttcttattatcatgctctgtctgagtatgaagccagcttgcataattatgctccacttcattaatattatcattaatagaatacatttctttaacaataccattacagtatatacatcttccggcattatcaaagcatataattccactattcatatccctgattataagtgaaaatgtattctcaataagctcattaggaacataactgtatgtcagataatatataagtacagacatgatgccaaatgcagccattgacatgtcatatattgaatcagaccacgtagtcattatatcaagcaaagatgcagctaataataatatgagaatagcaaaatacctgaatctgtagaatcttgacatcctctcaaccattactatataacttaaaataagcagcaacataatgccataagcaaatacataatgtaaccggcccagaacattaccttttgcaaactggacaattatctggtcatccgatatatatgttatatcaaatatccatctcgtccatgtattaatcagaaatgcaacagtctcaagcagcgaatatgcaatcataaaaacttttacacccacaatgcccttaaacatgcctgtataatactgggtataatacataagaagtataagaagccagtcaaagctcgccataataagtcccttacacagaactgtaatggtggttcctggaacatatgtatacactaaaaatattatcccacatataaatgcaccaagctcatataaaaacacaactcttgccagtgcaccctcttttttatatgcctttaaagcacacgccccaatcattaaaattaccgccgtaataataagcccataaaatactctcataagcgatatctcctaaatcaatactaaatttcacgtcttgtataaataatattatagcgcaaacttcttattattgcaaatgtagtacagccagattcttttaactctggtaaacaaacagacgattcattccctcctgccacggatactcaaattccagataaataatttcctttccaaaacgtgcaaatctttctttccagtaatttgttgtagcctgtcttagtctcataatatgattctcttcataaatgttatttcccatattctcatatccgaaactttccagttcttcttttgaataatacggattcattttaataaaccaatatccaccaggcttcaatacccgttctaaatcttcaactacctcctttgacacatcttttggcattacatccaacacatttgataatatcactccatcaaatgaattctcttctaattgctttaccgtatggtctgtaccttcaagaaaagttgccgttttataatcacttaatcttgctgtttcagttgcaaattcaatgcccgtttttgaagcatcaattcctaaaactttatgtgtaggctgatactgcaaatattgaaaagaaatatctcctgtaccacagccaaaatctaatacatttgttgttttttgtgcaaacagttttaacgcttcgtcaaacattgtttcaacttgtaaatctaaagttcttaaatccacaggtgtacattccttaaatacctgattccacatttctgtttctcgctcatatgccttgttcataatactgccatctccttttattctcacacatgctgcacagtaggaccgcccttatcaaattcatttaatcatgttctttaatatattgaactgcctttttgtcactctttgattttttataccagccaatacctatcattgtaattccaacaataatagctgtagttcttatcaatgaatctggagagcataaacaagatacaacgtttgtcgggtaacatgaaataatttgccaaactcctcttgtgttaattgattttctttccgaatgttcaatatttgatttcctatattcataatattacgacctcctttcaataatattatccgaaaaataatgttcaaaataaagcaatcatcacattacattgcatatatagttacgcaaagattctttgacatgtgcttttctctataaattacaattcattttacccattttaacataaaattcaaccaagttagaacttccatttacaatcattctacttcccctgacaccaagtgacataaaggtgcccaaaatcacaataatgtttattaaggcaatatcacaacagttgaatgatatttgtccaaatccatgctataataatatctaacgctatatgtgcagagagaatgtggaaggagtaaaaaatgtattcaaagtttgtggcaatattaatcaatagtgcatttggtttatgcattacatatactgttttttcagtgtattttgctttaacaagtaagtttattgtagaacgcagctttatattaggattttcattgtacaacattgtatggctggtgctagatattgtttacaatgaagcaagatatcatagacaaggcggcggtcttttcttttggacatccatcatgttacctccgatattaataatgttaatattgatgttggtaatagtgatgttttttaatctgacgagcgactaaaatataacctcctgaagctctttttcactcctaaatgtatatttcatgccagcctcctattccacaatgcttacagcgtcatttacggcgttatagtaatacagattgtcaggcattacatctgccttctccaagtcttttctgcacttcatcaatcacatcattcattctgtcgtccataacaacctcctataaataaaataagagcaagcacttaagtttctttactcaagtacctgctctgtttctttgtatcatagttattatatatagttgaaggttggtgatttgcgggtattctgtaaaatatagtctagaaactggaagttatctgtctgtttcatcttttttatatattacgccgtcccatgcataatatcccgcaatatattcataatcaggatattcttctatctcatataattttctcccactatcagatgtacaaattaccacatttgatattttataattttctagttccgacgtttgagaatatctaactccattaagatatatataatctcctttttcaattgcctcatttttataacttttattgtgtgcaaaataatatcgaccacaaaaaataataacaacaattgtaaccaaaataataattaatgctattgatttctttttatctacaatcattctcattagcttcctcttaacatttcatgaaattccgattcttttttcccattttaacataaaactcaaccaagttaaaactcctattctcaatcattctactccccctgacaccaagtgccacaaaagtgcccaacttcatatcaaacattcccagtgtttatgcgggttttcaaaatcacaataattaatacatggaaataataaagaatgaatttcttcacaagacgcccgttcccctcctagtcactaggcacggaaagaaaaaagggaatggtttttcaaccattcccatcttaatgagcccaccggggttcgaagccgtgagaccgcttaaacactagctttctttggactcctttatggcactagtccagtaggagccgatagcctgtgtaatgattagtgatgaaataagtgccggaaaagtgcccgaaatttcaataatgattatactattatattttgatgaatttatatatctccttttaggcgcactagagatttttttgtttcaaatccgtctggatatctcatctttaatttatcgatatttgctttaaaaatatcttcaagagatatatctagtgctgtcgcagcttctgccaaataccaagctacatctccaagttcctttgccaaatgttccttgtccaattcatgtccttgagccatccatttttttactatatcaatggcttctcctgattcgccacataatcccattacactatttattaatacatctcttttgcttagttcaggatttaaagtcgtcattgccaattcctgatattcattaatcttcattctaatctccatttctgagcaacttttgttgcgaagaggcgaagaaaaatttgcgcaggcaattttcctctgccatcaatggctatttgttctgctcataaacaaatagccgtgtgataaaataagctatcgagcttatttttcacacaaatattccccataatgtacaaactgaaattgttctgcttagtttggcaactcgctttcttcaacgggaactgcctctaagtcagtgttgctccaataagagctaatatctgcacttgtaaagtattcaaaattatctgtggaagatttcagattgcctttctttactccatagcagccataaatcagttcataacttgttccatcagaaaggttaaatctgaaacttgttatctctgctccagcggtttcctctacctctttgagttccaaggatagcccctcaaacatatcatacaagttctttatggtttcttcggcaacaatgaccttcttttctgctgacacaggtactccaacaaagtgatacatttctatattttcaacatcacctacctcaaaaggcaaatcaatattgactgtcttgttgttgcacccaaccaagccaagcacacaaaccacc

SEQ ID NO: 8513 - DNA, 196295 bp, Unknown
  gut microbiota DNA sequence
agggcttaaccaagagaaaaggttaagacggtttggatagaacaaagagagttattcttaagagtaatcggatgaaaaagtatttgtaaagacagatacgatatgatatatttaatatgcagttttgaaggaacaatccttctccttaaagataggggattggtcaaatggtatgataggggtctccaaaacctttggtgggagttcgattctctcatcccctgctgtttaaaggatttaagttgaatttcagcttgaatcctttttttgcatttaaaaactttaattataaagctaattaagcgaaataaaataatgatgaggagataatcatgaatgaaactaaatatgagcatatagtacacccatttccacctctgtataacagtgaatcaagaatacttatacttggaagcctgccttcagttaagtcaagagagcagatgtttttttatggacatccgcagaacagattctggaaaatgattagcggagtattcaaagaggcagttccgcagacgatagaagaaaagaaggcatttatgttaaagcataatattgctttgtgggatacgatatacagctgcgacataattggttctagtgacagcagtattaagaatgttgagccaacggatttgaagagtattgtagataattctaagattgaaaaagtaatatgtaatggaaaaacatcaggaaaatactatgaaaaatatcagatgaaatatctggggattaaaccagacattcttccatcaacaagtcctgcaaatgctacatattcattgggggaacttgttgagatatggaagaagtctataatatattagattttaacttatttttcaggtttaacaacattaagaggcatcataagatgatctataaggatactataagctttatcaccattaccagctttgagataatcaaaatatttcttgtgttcatctaatgtaccagttatacgtccatcgacctcaagagctgactgagaagtaagttttatcagatacataagtctttgaaaaatgtgattgacctcatcattgtttatgtattttaccaagagcagatgaaactgatgatcgtaactgatgaaatcctcataattgccattatctggatgatcttcaatagttttatattgcaggtcaagaatattgccaagttctctgatagttttctgacctcttgcagtattgatatcatttgcaagacaatgggtacagaaaccttctatggcacatcttatctgaatagtttctttcatgtccttctgattaagttgtctgatacgaaaacctttgcttggtataacatctatatatccgtcctggcttaagcactgtagtgcttcacgcataggagttcttgatattccaagttcttttgataatttagtttctgaatacagactgtttacatcaagtctgttggtaagaattaaatctttaatataattataagcttcctgctgaagtgatgacataagctgcatgatgttaaattcccttcaaatacatttttatgaataaaataataaacaaaaaaatacaattggtcaataattaattaaaaatctgtataccggtatactggatttgttgaaaatgtacaatgatattgtgaaaagtttgactaattttaataattgattcttaaccggtatactggtatactgcaatcaacaagaaaacaataaatcatttttcaggaggaaaaagaatgaacacaacatttgaattaggaaatttaaaagtaattgatttaacaaagccacttgatccaaagactgaatcaagaagatgccaccttatcagatacaacacaggtggtccaattcctgatttccatacagcaatggatcttacgagccaccttggaacacattgtgagtgtccttatcatcatgatgataactggccatcagttgctgaacttccacttacaacatttatgggaagagcaatctatgttgattttaaggatacattacctcatagaaagcacatcagtgcagcagaccttgacaaggcaacagaaggctgggtaaaggaaggcgatatccttatcattgattcttcttacaagattgacccatttactccagatactaatacagacaaggatcagagattacttgttaacggtgagacagcacagtggtgtgtagatcacaagattaaatgtgttggttttggtgatggcgtatcaattgaaaactgcaacgaagatgttaagccattccatgatatctgtatggcagagaacattgtattccttgaagtattaaagaacttagacaagcttacacaggatacattcttcatgtcatattcaccacttccaatttacggacttgattcttgtcctatccgtgcttatgcaattgagggacttgttgaattcgcaagataattagttagaataataaggagatacagttatgaagattgcagttcttggtgcaggagccatgggttcaatatatggaggacatctttcattacacaatgatgtctatatgattgataagaagcaggaaattgttgataaaatcaatgctgacggacttaagctttttgagaatgataaagatgtgatttacagacctgaggcaatgacagatagtgctaatcttggagaagttgaccttgtaatactttttgttaaagcacttttttctaaagcagcgcttgaagaaaacagacatattataggagaacatacatatttaatgactcttcagaacggagcaggtcatgaggatattctttcagagtttgttcctaaggaaagaattatcatcggtacaacagaagataacggagcagttcttgatttcggctatgtaagaagaggcggaaaaggaaagactaatatcggaatgctcgtacctgacagcaacggaatgcttggaaagattaaggaaagctttgattcatgtggatttgatacacacatttatgataatatccagcagcttatatgggataagctctttacaaatgtgtctctttcagctcttacaggggttcttcaggttccaatcggttttattgcagcagatgaatatgcatggagcatgactgtaactcttattaaagaagcactggcagttgccaaagctttaggacttgagtttgatgagcaggaaattattgaaagagtgagaaatacctctatcagttcaccagaaggaaagacttctatatatgcagaccttaaggcaggaagacgcacagaggttaatacaataagtggagcagttgtaagagccggagaaaagaccggagtagatgttccaactcacagaatgattgtcaacatggttcacgctatggaagacagagacagaaaggagacgaaataatgatattttcatctattaattcaaaggatgattttaccagttatccgaaggcagtacagagagcaattaagtatttaaaggaaaatgattttgttaatatggaaccgggcgtttatgagcttgaaggaaagcttatgtatgcacaggtatttgatgctgagactggttctgtaaatgagaaaagaccagaagttcatgagaagtaccttgatgtacagttcttagcttcaggtagagaaaagttaggatttacgcctgatactggcaattatgaggttgatgaaaaatttgatgaaagagatcttattttctacaaatcagtagagaatgaaggctttattacatcaacaccaggatgcttctgtgtattcttcccaacagatgttcacagaccagcatgtgctgatggagatcctatgacagtaagaaaagtagtagttaaggtaagtactgaattattaaagtaatttcagggaggtttttatgggtaaaaagtttattgcattatttttatgcatgagtttattagtctgttctgcattaacggggtgtagcactaacactacagcagatggacatgaagttaagattataagagttgcttttaaccagaatgaggaacatcctcagtataaggcaatgagagaacttggagataagtttgaagaagcaacaaatggaagatataagatggttatttatcctaacggagtgttaggtgagcaggggtctatggcagagtttataagaaccggagcacttgatatggctattgttccatgttcagttccagaaggatatgattcagattttgctattgtaggtgcaccttatctttatgatgatatggatcatttaagaagaacaacattatcaggtgcatttgatgagcttttcaagtcaacaagaaagttcaatttcgaagttcttactgtatatacagcaggtgagagaaatatttatgcaaacaagccaattaatacaccagatgaccttaagggtatgattgtacgagttaatgactcaacaacatatcttaacatggttaagtacatgggtggtgttggtacagcaatgtcacagtcagaggtttacacagcactccagcagggcgttattgatgcaggagagaacagtgagagagtatatacagactttaagcattatgaagttgctaagtattattcatacacaaagcatattgttcatcctgatgtagttatagcaagtactaacttccttgacagtatgtcagctgctgataaggaaatatttgacaagcttgttgcagattcaacagattacgaatttgatgcatttgcagaatcagtacaggaagcaaagaaggatgctgaggtaaatggtgcaatttttgtgtatcctgatacagaattattcagagaaaaatgccagccacttcttgacagtatttccggacagtcagaggttactaagaaaatatacgataaagtacaggctttaagagaggagaaataatatgacagcagctaaaaaagtattagacaagattacatcatattcaagtgttgtaatatttattgtaatggtacttatggtaacatatcaggtcatagcaagatatttcttcaaaagcccaagcagcgttactgaagtactcacaagatactgtttcgtatggctgattataatatcagcaacatatatgttcggacagagagagcatattaatatatcggttattaaggataagttacctaaaacacctaagatgatagtcagcataattattgagcttgttacaatctgctttgctggacttgtaatggtatatggtggttttacaatcgcaaaaatgaatcttgtacagttagatacaattcttcatattccaacaggtgtcatctattcaattattccaatatgcggtgtgattataatcttctacagcatttataatattggacttgaactcaaagcaaataagcaataattatgaggaggactttcgcatgagtatagcattacaggtagccttagtaatggttacaatattagttatattgctgataatcggtgctcctatcggtgtagcaatcggtctttcatcagcagtttcaatgatatgcatgattccggcaaatgtttcttttgcaacttcagcacagagaatattcgcgggttcgaattcattttcacttatagccattccgttctttatccttgcaggtaatataatgaacaatggcggtatcgcaacaagacttgttaattgtgccaaggttattgctggtagaatgccaggagcacttgcacagtcaaatgtagttgctaacatgttatttggagccatcagtggttcaggtgcagccgcagccgcagctatgggaagcacaatcggaccattagagggaaaagaaggttatgataagaactacagcgtagctgtaaatgtagcttcagctccggttggaatgcttattccaccaagtaatacaatgattgtatattcaagtatcgcaggaagtgtatctattgcagcacttttcatggctggttatattccaggaattctctggggtggagcagttatgattcttgcaggtatcatggctaagaagcgtggataccaggcagaagaaagagtaacatttaaaattgcaatgaagacattctggcaggcaattccaagccttttacttatcgtaattgtaataggcggtattcttgcaggtgtgttcacagctacagagggttcagcaattgctgtagtatatgcaacagttctttcacttatttataagtcatttaagttaaaggacattccaagaattgttcttgagtcagcaaagacaacaggtatcattacatttatgattggtctttcatctatcatgtcatgggctatggctttcacagaaatccctgatatgattgcaacagcaatccttggtcttacagacaacaagatacttattcttcttttaataaatgtgctgttacttgtagtaggaacatttatggatgtaacaccggcaattcttatctttacacctattttacttcctatatgtacagcatttggcatgagcccaatacagtttggtattctgctctgcttcaacttatcaatcggaacaattacacctccggttggaacaatcctcttcacgggctgccgtgttggtggagttactattgaaagtgttatcaagtacatgttaccgtactttgctatcattttcgtagcattattactggttacatacatccctgcaatttcaatgttcttacctaagattctgggattggtgtaataaatatcttttttcctaatataatgtgcacataggaaaagtaagcgtctgcagagcagacatttacttttcctgtgccattaacgaacgaacggccatgcgaagcagggcgaaagagtgcgaaagcacgggttcgtgagtgtacgttaaaaaatgaataaattataataagaaaggcacgggctgtcagtttggcagtccgcgtcttttaatttgccaataaataaatactatgatatcattaattattatgtggaaaaggaatgattcatatggataatattattataagaagcatgaaagaagaggattcttcagaagtccttgagatgatgaaggtgttttatgcctcaccagcactgctttcagacccttcagaggatgttatgaaaagggatattgcagattgtcttggagataatccatttatagagtgttttgtgttcgagaataacacaggtgtcatcatgggttattcaatggttgcacacagctattctactgaatgtggcggtaattgtgtgtgggttgaggacatatatattaagccggattacagaggaaagaatattgcaggtgagttctttgaacatcttgacaatatgtatggaaaagaagctgtaagattcagacttgaggttgaagaagagaatgaaagagcagtgaaagcatacaagaaggctggatttgagagactcggttatgtgcagatggctaaggattactaattggagttgttatgaataatagttataatgaaagaagcatgaagataattgaccttaagaaaaccattttagaggataatgacgttgatgctgacagattaagagaagagttaaagaagaaaaatgtattctatatgaatgtcatgtcaagtcccggttcgggtaagactacaactattgttggtacaattgaaagacttaggaaacattttaatataggtgtaatggaagcagacattgattcggatgttgatgcacttactgttgctaaggcaggagtgtcagcagtacagctgcacacaggaggaatgtgtcatcttgatgctgatatgtcaagacagggaatggctgcgttagaagctgaagcagataatacacttgattttattatacttgagaacgttggtaatcttgtgtgtccggctgagtttgatacaggcgcatgtcttaatgtggcaattctttcagttccggaaggagatgataaaccgcttaagtatccgcttatgtttgagaagtgtcaggttgtgattattaataagattgattccatgccggcatttgattttgatatggatagggttaaggataatattgcaatgagaaatccggaagcagtagttttccctatttctgcaagaacaggagaaggaatggatgcatggtgcgaatggctaaaagacaatgcagcacaatatttaggagagaaccagaatgggtaatgtaagagtaattgatgtacatcagagtgtttatgccgttaatgatgagatagctgctaagacaagggcaaggcttaaggaagagaaaacatttatggttaatcttatgtcaagtccgggagcaggtaagactacaactctgataagaacagctaatatgttaggagacagatatcgtataggtgtaatggaagcagatattgactcttctgttgatgctgagaagatggcggcagcaggggttacttcaattcaggtgcatacaggcggagagtgtgcgatggacgctcatatgaccatgcaggcacttgatgaatttgacacagagaggcttgaccttcttgttatggagaatgttggaaatcttgtatgtccggcagagacagatacaggagcatcgcgtaatgtcgttattctttcgtatcctgagggtgatgataagccacttaaatatcctcttatgttcgaggtgtgtcatgtagttcttatcaataaaatagatactaaagagtattttgattttgatgacaaagcagttgttgaaagaattcacgaaagaaatccattggcaaaggtatttttcgtatcagctaagactggcgaaggctttgaagaatggataagctggcttgacaataatattaaggaatggattggaggtacagtctgatggtagacagtcgtaattttaaaaaacagaatcagaaaggacagggattaaagaagcataagtggattccgcttgttgttatcgtagtgcttgcacttgtacttattcttatacagtattttatgattgatatacttatggcagtcaacacaaaatagttcatatattcatgaatttggaaagatttaataatccccagccctgcagattatctggcagggcttttttagtacagcatgaatggagccttttctttatctctttaggagacatgtctttttttatcagaacatctgcaattgcacctgaaacaaccggggcagacatggaagttccactttttacagaatatccgctaacggaattattgcacgacctgatatatgaaccatttacaataagctctggttttactatacattcactggttggacctcttcctgaatagaaatctttgccatccggggaaccgactgtgataatttttttgcaggttccggggattgcaacagtctgtcgtccaggcccttcatttccagcggctgcgacaacaattatattattgtcccaaagcttttcaattgctttttcaagagcaatgagattttccttttcgccaaatgtggttgcaccgaaggatatattgacaactcttatattcaaatctttctgatgggagattatccagccagcagcatctaaaacattttctatcctgccattaccaagtctgtctaataccttgattccggcaaggcaggcagaaggacagatgcctcttattctgccgtggcttgcataaccgctgccagcgataattccacttacatgggtgccatgtccacagtcgtcataagcattttttctgccattgacaaagtccttgaaagctactatatggtttttgaaatctatatgaggatatattcctgaatctattacagcaacagtgattaatttattcataataattattttcagaacataatatatatattttagtatattcagattaggtggtttagtgcggttatattacagggattagatgtgactgattattcatttactttcttataaataattgatataatttaaatataaaaattatggaggtactttaatgaaacagttaaatgaaaaagttgctattgtaacaggagcaggccagggaataggtaaaggaattgctctttgtcttgcaaaaagaggggttaaggttattgcaacgggacgtagagtagagccaattgagcagacaattgcagaaattaaggaattaggaggagaaggcttcgccatgacatgtgattcagcagacagagcaagagttgaagaggttgttaaggctgctgcagaaaagtatggaacagttgatgttgtagtaaataacgcacaggctattgttccttctgctccagttgaagaaacttcttatgataatatgcttaaggcatggcagagtggtgtaattggttcgcttaactatatgcaggctgcattcccttatatgaaggaacagcatgaaggaagaattattaacttcgcttctgcaacaggtatgtttggtattgcaggacagttagcttatggttctaacaaggaagcattaagaggtatgactaagattgcagctaaggaatggggacagtatggtatatgtgtcaatatcgttcttccaggagcggaatcaccagcagctaaggcatgggctgagaaatttccagaggaatatgcgaagcaggttaaccttaatcctatgaagcgttttggtgatccagagacagatattgctccagtcattgcatttttagcaggtccggattcatgctatttttcaggacagagtgtgattgttgatggtgctaattctataatgccataatgactatatacatattgaaataatttgctttttggcggttcatggaatataatatttacatcaataataatcgtgtatgagaggtttatgttatggataataagagaattgtagttgccttaggaagaaatgcatttggagaaacatttccagagcagcagcagaatgttaagaaagcagcagtggcaatagctgatcttgtagaagctaagtatcaggttgttattacacacagtaatggaccacaggttggtatgattcagacagcaatgactgagtttgcaagacttgagcctgatgacagaacagttgctcctatgtctgtatgcggagccatgagtgaaggttatattggatatgatcttcagaatgccataagagaagagcttattaacagaggaatatataagacagtttcaactattattactcaggtaagagttgatccttttgatattgctttcagtgaaccatctaaggttattggtagatatatgtctaaagaagaagctgatgctgaagaagagaagggaaattatgtagttgaagaagagccaggtaagttcagaagaataattgcttcacctatgcctattgatatatatgagattgatgctgtcaaggcattacttgatgcagatcaggttgttattgcagcgggcggtggtggaattcctgtattacagcaaggttcacatcttaagggtgcaagtgctattattgaaaaggattatacagctgccaagttagcagagcttgttggagcgggaacattacttttccttacagcatatgacaagcttactataggaaagggaacaccagaggagaaggtatttgatacagtttctgcaacagatcttcaccaatatattaaggatggtcacttcccggcagttacaactttccctaaggttgacgcatctatcagattcgtaacagcagataaggaaagaaaggctgttattgctaatcttgagaaggctaaggaaggtcttgctggaaagacaggaacaacaattacagcgtaatattttactcataatatcaaataaggcacggacatgaatgtccgtgccttatttgcaaatacaaatttaaatattaagcagcttctttaactccgttgccaaagaaatcttcataccatacaaggaacatgtaaattgtccatatcttacgtgaattatcggccttaccttctttgtggtcatcaagatatttaacaatctcatcagtgttaaaatacttttcagcagcttcacttgtgaaagcctttttaatcatattgtagtacttctcatccttgagccagattctgataggaacagggaatccaagtttcttcttctcagcaaccatgtctggaagatgtctatgggcagcctgtctcatggcatacttggtattactcttgttaaccttgtacttagttggaatagtacgggcaacattgaatacttccttatcaaggaaaggaactcttacctcaagagaatgagccatactcatcttgtcagccttaagtaagatatcgcctatcagccagaaattgatatcaatatattgcatcttagtaacatcatccttatcagcaaccttatcatagaaaggctttgtaagttccttatggtcatacttgccggtaggattctttaatatcctggcacgctctttttcattgaacatgaaagcattacctatgaatctttcttcaactgtcttgcttgctctgttcaagaagctttttcccttgaatttgaatgggatagcgttggcaatattggcaagtccttttcttaagcccttagggagcttctgaaattctgcaaggtcaagtggttctctgtaaatgttatatccaccgaagaactcgtcagcaccttcacctgacatggcaacctttacatgcttggctgctgtctggcttacaaagtaaagtgcaatggcagcagggtcagctaaaggctcgtccatatgatactggattttaggaattgcagcccagtattcttcacttgaaacaagctttgaataattgtcaatcttaatcttgtcagataaagctttggcatagtcaatctcgttgtatttttcataatcaaatccaacagtaaatgttttgtcaccgttaaatgtagcagcaacatagcttgaatcaacaccgcttgagagaaatgaaccaacctcaacatcactgatcttatggtgttcaactgaatcatgcataacatcgtcgatttcatcaacaaattcatctaaagacttgctctcatcagcatcaaatgttggctcccagtatctttcaatgttaagctcgcctttgtggaatgtaaagcagtgaccaggcatcaacttgaatattcctttgaaaaatgtttcatcaagtactgagtactggaatgtgagataattctcaagtgcaacaggattaacctctttcttataagcaggatgctctaagatacttttaatctctgaaccatatatcatgttgccgtctgcaactgtgtagtagaaaggcttgattccgaagaagtctcttgctccaaaaagagtttctttttcactgtcccagattacgaatgcaaacattccacgaagcttgttaagcatgtccttgccatactcctcgtatgagtgaatgagaacttcagtatctgaattgttagcaaatacatgacctttctcaataaggtcttttcttaaatcctgatagttatatatctcaccgttaaatgttattactatcttcttattttcgttaaacataggctggcttccgttatcaaggtcaatgatagaaagtcttctaaagcccatgtatgctttatcatcaatgtatttaccagcactgtcagggcctctgtgaataattttgttcatcatgcgttcaagaacagcatcaccatcagccaagtatccagtaaaacctgcgaatccacacatgtatctgtacctccataattatgactgcacaatctgtgcattgttaaatgtagtgtgtaaaaattacttatgaattataacaaagtaatcaggctaatacaagtcagtttctgtttacaaaatatttgaaataaattataataattaatcaggtaagaaaaagaaagagaggttctttatattatggacaaaattaagatgacaactccacttgtagagatggacggagatgagatgacaagagtattgtggaagcttatcaaggacgagctgctcactccttttattgatcttaacacagaatattatgatttaggtcttgtacatagaaatgagactaatgatcaggtgactatagattcagcagaagctactaagaagtatggtgttgcagtaaagtgtgcaacaattacgcctaatgcagcaagaatgacagaatataaccttaaagagatgtataagagccctaatggaacaataagagccatgcttgatggtacagtattcagagctcctattatcgttaagggtattgagccatatgttaagacatggaagaagcctatcacaattgcaagacatgcgtatggtgatgtgtataaggcatctgagatgaaggtttctgaggctggtaaggcagagcttgtatttactaatgaggctggtgaagagacaagagagcttattcataactttaagggcgcaggagttcttcagggaatgcataatctcaacgattctatcgagagctttgcaagaagctgctttaattttgcgcttgagacaaagcaggatctctggtttgcaactaaggatacaatctctaaaaagtatgaccatacatttaaggacatatttcaggagatattcgatgctgagtataaggataagtttgaagaagctggcataacatacttctatactcttatagatgatgcagtagcaagagttatccgttcagagggtggatatatctgggcttgcaagaactatgatggagatgttatgagtgatatggtagccacagcatttggttcactttcaatgatgacttctgttcttgtatcacctaatggatattatgagtatgaagctgcgcacggaacagtacaaagacattattataagcatcttaagggtgaagaaacatctactaaccctattgctactatattcgcatggacaggcgctttaagaaaaagaggagagctggataatattcctgagcttggaaaatttgctgatactcttgagcgtgcatgcattaagactattgaagatggaaagatgacaaaggatcttgcacttattacaacaatggagaaccctgtaacacttaatacacaggatttcatcagtgcaataagaaagactcttgaggagctcctttaattaaggggagaattttccatttaatgatggagggtacattatgtcacatataatgggtataacatttagaagtatgaatataagccagcttgttatatggttttttatatacagctttcttggatggtgtatggaatgtgtggttatcagaaagcagcttggttactgggaaaacaggggctttgccaagctgccgttctgtgtaatatatggtttcgggacactgattgcttttaatatttttaagccaatagagcataattatattgcactatatatttttggatgtatatgtgctacagcatttgagtaccttacagcacaggttatgttaaaactgtttggtgaagtgtggtggaattatgatcatcttaagtttaattacaaaggcatcatatgcttacagtcaacacttgcctgggggtttgttgccgtatttatattcggatttttgaataaatttgtggagcgttttgtattctcaatcgattacaggattgccagtgttatggcaatgattcttgtcttttcatatactgcggattttatgcagagtttttcggaaagtcttaatatgcagaatatggatatcagagcggagatgagaaagtttattaagatgtttcacagataatcagcatcttattgacaattgattcggggataattatatgatttttaaaaagttacgaaacaattttagtcttttaattgacagcagcaggcatgtatggacatttgaactggcatacaagcttgttgcttttgctgttatattccctattgttttatttgcaattaattttcttatgaagatagcaggagtgaactatcttactaatgaatatattcagagagcaatgacacaccctgtagtcatatttgcaatttttcttgctatgggtatatttgtattctattgcacttatgagatgacatatctttcagtctgtttcgagacaaagagaacatcatgtaatgcatctgttgttgatatattttataattcttataaggtttttaaaaatgtttttaagccaaggcatgtaggtctgagtatattttacttcatatcaattctggcttccaatgtaactgtatggtttaatgtcttatacagtgagactaatactaacttaattaaaatgtatatcattaggaatcactggtatattaaggctgaagttatatttatgtttgtcattatatacgcaattgtaattcctggaatatatgcaatgaatatatgcatgatggaaggactgggatttagggaagcatataagaaaagtgcccgtatggttaagaagcatccaatgggaacaatatcagcacttgttgtgtataatctggttatgcttgcaattattggaataacttatgtgcttatatcagtatttcttgttgcaggtgttaagattcttaatatggcatatcttggaaatgctatatttctgtctgcattaaggacagaaagactaattataaaatgtattcttgtatgtgtagcaataccactgtctttttcggctatttcacatatgtattacaaatatactgatgtagacgatattacatttgagttcacagatatacaggaaggtcctgcaaaaagaagaaagataatatatagtattgttttaactgctgctgttgttgcagatgcattttatctaataatgacatttaacaataatccatttgaaaatgtagctatctttcatgagactaaggttatggctcacaggggggcttcaacagagacacctgagaatacgatggccgcattccagaaagctatagatgatatggcagattatattgaacttgatgtacagcttacaagtgatggagaagtcatagtgatgcatgattctaatgcatatcgtacaacaggtgtggatgaaaatattgtaaatatgacatataaagaggttagaaggctggatgcaggttcatggtattcagaacaatataaaggggaaaaagttccaagtttaagggaagtacttgaacttacgcagggaaagattaaacttaatattgaattaaaaccggctggtaatggggatgaacttgcgaagaaaacagcagctctcattgaaaaatataatatgacagcggattgtgtagtaacctcattcagcaaatcagctttactggctgttaaatcatacaatgaaaatgttaaggttggatatattttatcagctgcatatggggatttttatgatatgagtaatatagatttcttcagtgttaatgcagcgtatttatcaaagagaactattgatgcaattcataattcaggtaagcaggtctatgcgtggacagttaataataaagattctatcaagaacctgactaacaaaggcgttgacggcgttatcacagataatccggttcttgcaagggaaacaatatattcaagagatacatcagaaactattgttaacatgataaggtatgtgtttaatcagtagaatgggggcatatgtatggaaagaggaataggaacttcaagaggaattggaataggacatgttcttattgtttataatgccagtgctgttgtaaacaggggaacgcattataacgcagaagaagagaagaaaagattctttgaggcaagaaaaacatttatagagcagacggaagaattattatctgaactggagaaaaaacttggtgagtctgacaaggatgcactggtgcttaagaatcagatatatcttgcaagagatataacaacagagaatgaagtcgttgctgcaattgataatagtcatatatgtgcagaagcagcttttgatgatgtgtgtaataagctgattcaattgttttcttcaatggataatcctgatatgcagcaacgtgttactgatattcaggatatgagagaaagaatgatacagacattgcagggaacgaaagcgtttgaccttactaatcttccagataatactgttattgttgcagatgagattaagccatctatgacagcttccatggacatagcacatgttgcaggtattgttgcagaaaaaggcggcgatacggcacatgcttcaattcttgcaagagcacttgagattccggcagtacttagtgtgaagggaatacttcagaaagtaaaaaatggagattctataataatagacggagcttatggagaagtttttattaatccaacacagcgtacattttctatatatgaaaagaaaaagaagaaatatgaagaacacattgaggaattgaagacatttattaataaaagcacagagacagctgatgggaaaaaggttatgcttgctgccaatattggtggagctgatgaagcagctaaggctgttaaggctggagctgaaggtgtgggacttttcaggactgagtttctttttcttaataagaatgcgctgccgacagaggaagaacagtttgaggaatataagaaggcggcagtgctgacaaaaggtatgccgcttacaataagaacacttgatattggtggagataaggatattccgtacatgggacttacgaaagaaaccaatccttttttaggataccgtgcaataagactctgccttgacagagttgatatattcacaacacaactccgtgcgatattaagagccagtgcatatggctctataagaattatgatacctatgattacgtcagttaatgaagtgagacaggttaaagatatgattaagaaaatatgcagcgaccttgaccataatggaattagttatgacaagaatatccagacaggcgttatgattgagactccggcagcagctattatggcagatgctatagcacaggaggttgatttcttttcaattggtactaatgatcttacacagtatacaattgcagtagacagatgtaatgaaaatgtagcatatctgtattctgcattcaatccggcagtgttaagacttataagaaggataatagaatgtgctcataatgcaggtattgaagccggaatgtgtggtgaggcagctgcaaatgctttaatggcaccgatacttttatcatttggtctggatgaattctcagtatcaacaggaaaggtattagagacaagaaagacaattgcagactggtcacttaaagaagccggacttgtaacagataaggttatgtcaatggcaactgagaaggaagtaacagactatcttagtgattatttatcagaaagaaataaaaaataaaaggaaatatatatatgacagtttatgaaacagatgagattattgagagagttattctggttggagtagcatttgacacagatgacgacacagagcgctctcttgatgagcttggagagcttgccaagacagcaggtgcacagaccgtgggaaggatgattcagacaagagataactttcaccctgcaacatatattggcaagggtaagatcgaagaattaagacttatgattgatgagcttgatgctacgggaattatatgtgatgacgaattaagccctgcccagtttaagaatcttgaggatgaacttggtgttaaagttatggacagaacaatggttattcttgacatatttgcggcaagagctacatcgagtgaaggtaagattcaggttgagatggcacagttaaagtaccgttcaataagacttgcggggtttggaacatcaatgtcaagacttggtggcggaataggaacaagaggtcccggagagaaaaagattgagacagacagacgacttataagagacagaatatcaaagctctcagcagaccttaaggatatgaaggagcacagagatgtccagagaagcaaaagagctaagacttcaacacctgtcgcagctatagttggatataccaatgccggcaaatcaacacttcttaacaaacttactgatgcaggtgtgttgtcggagaacaagctttttgcaacacttgaccctacaacaagaagtatggaacttcctaatggagagaaagtgttgcttactgatacagtcggatttataagaaaactgccacataatcttattgaagcattcaagagtactcttgaagaggcaaagtatgcagacattatagtgcatgttgttgatgtatccaacccggactatgaacagcagatgtcaacagtatatgcaacactaaagcagttaggtgttgaaggaaagcctgttattacattatttaataaatgtgatgttttaccggagaaaccggcagctaaagatttacacgcagactacacatacaatatatctgccataagaggcaatggccttgaagcatttaaagagtgcatacaggaaattattcttaagagcagaataagaattgaaagagtatttccttacagtgaagcaggcaagatacagcttataagacagtttggacagcttgaaagtgaagagtacacagaagatggaatcaaggtgcttgcctatgttcctaaggagatagaagggaagttgtaattatgaatctgatagcaacagtagataagaactgggcaataggaaaacagggacatcttcttgttaatattccggaagatattaagcttttccgaatggaaacagctggaaaagctgcaataatgggaagaaagacatatgagcagattacggacagaacagctcttatagacagatataatgtagtgcttaccagtgatttgtcatataagaaggatggagttgttgtagtacattcagtagaagaggcacttgaaaaggttgcatcatataagtcagaggatatatatgtaatcggtggagaatctgtatttgaacagtttcttccatattgcgatgtggcacacataacgagtgttgattataagtatgatgcagatgcacattttcctaatctggataagatgccagaatggaaagttacacagatgagtgaggaacacacatactttgatttgtgctacgaatttaaaaagtactgtaaaatgtaaattatgctttgaatcgtgcagaaacggatatgatagaaaagtttctggcatattttcttcattgaaaatatacattttatttgatactataataaaaaaacaagagaggggagaaatgttatgttttgcacaaaatgcggatataatgcagggacagctaagttttgtccaaagtgtggaaatcctttaaatccacagccagtacaggaaacacctgtacagaacgaaccagttgcacagacggtacagagtgagccggttgaacagcagcagtttggaacacagccacagtttaatgagacagtacagcagcagttcggaacacagccacagtcaggggcagttccaccagtgaatgcagatgtaccaagatatcaggaagcacctcctatgcagccacagcctaagaagaaaaagaagaagtggccaatagtagttgctataatagcagttattgctgcagcggcagcagtactcggatttgtagtacttcctaatgtattgtcaccagataagcatgcaatagcagctatcaagaagcttggaacaggtcttgaggatacagcaagcagtgcatttgataatatgtcacttacatctgtatcagacaagaatcagataacaggtacattaaagattgatactgcaacaattgatggcgagaagtattcagattatatcaaggctgatacagttacatatgatattcagatggatgcttcaacagagaagatggcaggagagattaagctacagaatggatcagctacagcacttacagttacattttattcagatggcaataatatgtatttcaaagtgcctgagttattctcagagtcattcgtaatctcactggcacagtttgaggatgaaattgattcgggattttcttatggaagtttgggtagtatttcaaagtatttctcagcaatagatacaagcaatattgaattatacagagaacctgttaatgcagcagttaaatgtgtagttaaggggattaacacatttgcagaagaatgtgaatacaagaagggtgataaatttacatataattcggataacggagatatcaaggtttctgagtatagcattacaataactaaggagactgttattaaggcatgcgaaacagttattgatgaattatatgcaagtaaagatctttcttcttatatgacaattcttacaatggcaggcgtttcacagacaactatcaagagcagtattgagagttcattaagtgatatgcagccagttacattgtcaatgtatattaataagaatgatgagattgtaagacttgcaattgatgcagcagattataatacaagcgaaaaaggatttgttgcgatctcatttcttggtaatgacaatccatttgaatatgttgttatcgaagctgatgttgatgatattaatatgaagtatacagtaaagacacaggatgataaggctgcactggcattagagatgactcagaataaagagtatatcaaagcaggagcagaacttagttcatcaggaacaacagttaagattgataatctttatgtgaacagcaatattgatgacagcaatatagatatgaaactttcaggtgaagcaacacagaaagaattcagcaagttaaaatattctgcatcagattattcaggtgcttacaatcttgctaatcttacagagacccagagcacaacactggcatatgagcttatgaagaatttaaatgttttatctaatgttttcagtgataagttatataatgaattgtttaatggaaagagttcttctggtagtgcaagacttgggttttaatggcagttattaactaatgagtaattagaaagatgagggtatataatatggaattggcaattattattggggtagttgtgattttatttgttgtgtttattcttgcaagttatattaaagcaccaacagacagggcattgattgtttctggtttaagaaagaatcctaagtttgttattggtaagtcagcgttaagaattccattcttacagagagttgataaacttgaacttaagatgatttctgttgatgttaagactaaggaatcagttccgactaacgaatatatcaatgtcaacattgattctgctgtaaagattaaggttggttcttctaaggaaatgcttgagaaagcagcaagcaacttccttaacaagaacgaagattatatcagaaactcagtaggagatgtattagagggtaatgttcgtgagattataggacagatgaggctggaagatattgttcaggacagaaagatgtttgctgagaaggtacaggaaaatgctgctccggatatggcaagaatgggtcttgaaattgtaagctttaatgtccagaatgttactgatgaaggtaatgttattgagaatcttggtattgacagggttgtaagtatcagtaaatcagcacagatatcaagagcagaatcagaaagggatattgcagttgccaaagctaatgcaacaaagcaggcaaatgatgcaagaatcgaagctgagactgctattgcagaaagaaataatgaacttgagattaagaaacaggaattaaagagagcagcagatgttaagaaagctgaggctgatgctgcatacgaaatacaacagcaggaacagagaaaaacaatcgaaattacaactgctgatgctaatatagcaaagcaggagaaagagattgagttaagagagaaagagattgctgttaaggaaaaaacacttgatgcagatatccgtaaacaggcagaagcagagaaatacgcaacacagcagaaggctgatgcacagctttaccagagacagaaggaagcagaagcaaagcagtttgaaattcagaaacaggcagaggctaagaaagcacaggcagaagcagacagatttgcaaaagagcaggaagctgaagctgttaaggcacagggaattgctgaagcagaaagcattaaggcaaaaggtcttgcagatgcagaaagtattaaagccagaggtcttgctgaggctgaggctatggaaaagaaagcggaggcaatggctaagtatggtaaggctgccatgacagagatgattattaaagttcttccacagatggcagaagcaattgcaaagccgcttgaaagcattgataaggttactattattgatggaggttcaggagagaacggagtaggaactttcagtggtaatgtaccgtcagttcttgctaagacaattgaaagtatcaaggaaactacaggctttgatcttacagaagtcatgaaggctaatacatatgatgccaagactactaagaacgttaatttcacaggtcttccagaagagatgagtgcagcagctaaagagcctgaaacttacggtaaaacagaataatactgattaattaagaatctaaacgtaaaatgtatatgctggtatcagatattggaaactatatctggtatcagcatttttatagtttatagtaagagccggttttacaggttgactatataaattgatgtgagttataattatatgattaaaatttaaggagaatagcatttgaataatacaagtgcatgtgaacaatgattaaacacagatattttgcaggaagagttcttgtatatggattgataagtgttgcagttatgttatctgcagcagtgacaggatgtaacaacaagaataatatttccgaaggaagtattaagacagaagctgtccagtcagaagggaataatcagtcagaagagggcagtgagtcagatgttaatgaccagccgtcagatattcatgttgagccaccggtaattcatggtatatcagataagacatattatataggcagtaaagtttcatatatgacagatgtgtatgcaacagatttctcagggcaggagattgatgttgaggttgataaatcacaggttaatacttcacagccgggaagttatattgtttattataaagcagtagattcagatggtaatgagactatagaagaagcgacatttacttttattgaagaggagacacaggaagttaaagtaaacagcagttattcaactcttgatgaagttgtagctgcagttcttcaggatattacagataattcaatgtctaaaggacagaaagcaagggcaatatataagtatgcacatactaagattggatatgcaggaaacagttatacacagagttcagaatggcaggatgaagcatttgaggcattaaaagtgattaagaagaatggatatgtgtcgggtgactgtttcacatatgcttctgttgacagagcgctccttgaagggataggagctgagtgtatatgggttgataatcagggcgcaaggtctggagatcatagctgggttttatgtaatcttggaacaggctggtatcattttgattcaacaagaatgtatgatggatttgaatgttttatgctgacagattcacaggtgcaggattatattaacagaggaaattcaatatatagaagagatatgtccgcgtatccggcaactccttcagaagagttttcatattagggaggagtaagataaatgttatttacatcttatcagtttattttatttgttctggttgcacttattttatattatgttgcgcctaaacgtattcagtggatagtactgttatgtatgaatatgttattctatgtgtatgccggattaagcggaataatattcatagtaacaactatcataacgacgtatgcaggtgcaaggcttatatgcagggagaaagacaggtctgtacgcttcatagaagaacataaaggtgatatatccagagatgaaaagaaaaagcttaagaacatttctttaagaaaacagaaaatgtttcttactattgttctgtttattaattttggaatacttgctgtacttaaatacaccaatatgtttatagtcacatttacaacatttaatacggttgattttgtacttccgatgggaatatcattttatacattccagtctactggatacatgattgatgtgtatcgcggtgttgcagatgcagagaagaatccgttcagatatgcactgtttgtgtcctttttcccacagctggtacagggacctataagcagatggaatgatctgaagaaaagcctgtttgaaagtcatgctttctcgtgcgttaatatacagtatggttttgagagaattctgtggggatattttaagaagatggtaatcgcagacagggcagcaatcggacttgcaacaatacagtcagatgtttcagtgtattatggtgcatatgcatttgtaggaatgctgctgtatgcaattgatctgtatgcagatttcacaggtggcatagatattacaattggtgttgcacagatgtttggaattactcttccagagaatttcagaagaccattcttttcaaagagcattgcggagtattggagaagatggcatattacgttgtgtgcatggtttaaggattatcttttctatccgttatcaatgtctaaatggatgaataaggtatcaaggtggcttaagaagcatgtaggaaagccggtaggttcaagatttccagtgtatttttcaagtcttactgtgtggtttgtgacaggtatatggcatggtgcaagctggaacttcgtagtgtggggacttttgaacagcataattatgcttgtttctcaggaacttaagccgttatatgagaaggcagataacaggttaggttacagaaagttaaaatactacaaagtatttgagataataagaactactgctatagtatgctgtctgcagatgcttgattactacagaaatattgcagaggcattccgtatgtttttctcaatgtttacaggtggtaattatgcagctgtattcactaagggaatgtggagtattggtttatcagtagctgattatatagtactttttgcaggtgtggttataatgtttgtggtaagcctgcttgagagaagatgtccggttagagagcagcttgcacagaaaaattatattataagatatacagtatttcttgtgatttttctgcttatagctgtgttgggaatctatggaaccggatacgagtcaagtcagtttatatataatcagttttagaaagcattttctaaggaatggagacagttttgagaaagaaaatatgtacaggtattgcagttatcataataccgatagtatgtctgtatcttttacagtgtctgttagttcctaaatatgcatcagatattaaagaaggtgcaatgattgaggaatattacaacagtgaaaagaatcacgatgtgcttattcttggtgactgtgaagtatatgagaatatatccccggttacaatgtgggagaattacgggatatcaagttatatccgtggaagtgcggaacagcttatatggcagtcgtattatctgctcgaagatacgcttaagtatgagaaaccgcaggttgttattgtaaatgtacttgcaatgacacaaagagatgccaaaagcgaggcttataacagaatgacactggatggcatgaagctttcaaagtataagatagcttctataagggagtcaatgacagaagatgagaatatggccagctatatatttccactgttgagatatcactcaagatggagtgaattgtcatcagaggatttcagatatatgtggaaaacaccatccgtcacaactaacggttatcttatgcagaagggagtaagaccagttacgactataccaaaagctgctccacttgctaattatacattcagtgacaggaacatggagtatcttgataagatatattcactttgtaaagataatggtattaatcttgtgctcatgaaggcaccaagtgtatttcctcactggtatgatgaatgggataagcaggtgaatgattatgcggatgagcatggaatattgtatcttaatacaattaatgaggctgaaaatataggtatagactatactactgatacatttgattatggacagcatcttaatgtggaaggagctgagaagctgtcgttatatcttggggaacagcttgtgaagaaattcgggcttacagatcacagacaggatgaatcatataagaatgtatggcagtcaatagttaataaatattacgaagagaaacagggagattgattatgagaaagaagagtttaatgttagcggcagtacttgcagcaggagttatgatggtagcatgtggaagaacatcaacactgccagataatagtcaggacaagccagttgcatcacagcagacggaaagtaagtattcatttgaattaaaaggcatagagttaaagacagatggcgatcttacagaatatacatctaagcttggagaaccttctggtggttactatgaagctaaaagctgtgcatttgaaggaatggacaaattctattactatgatagcgtaacactacagggatatcagaaggacggaaatgataagctttattctataacacttatggatgatgctgttaagactaaagaaggtgtccgtattggcgataagaaggataaggttgtatcagcatatggaagtgattatacagaagctgacggacagcttctgtatgaatcaggtaacaccagactttcgttcgttatgaaggatgatgaagtacagagcataatatacagtgttaaataattcaatggagcagcgtatatttatgagtatacaatatatgtgttgtatcggaatttacgcagcttctgctccattttaatggcgtttgaaagctgtctgaaagcaccaacctgaactttataatagtcgttttcatatatgataaaagccgggaatccttcaataagcagggaattaagcatgcggtctgcattatttttattgcggtaggcaccaacctgaacacgatatagtggctcaggagagaggtcatcatcgcagttacatgctggtttagcaggaggtgcaggctttttttcgcatgctgcaggcatgatttcagcggatttggcagaatctgatttcactgatgagacttcacctgaagcagcctgtgcagtagtattatttgtctttggtttaattccaagggtcttaagaatgccatctgcgattccatttgcaatctggttaaagttcttatcaaatgtttcattatctttatcgttgttaataaagccggcttctacaagtacggcaggcatttttgtccgtttgagtacaacaaggttaggacgttcggtaattccaagatttttaaagccagccttttccagctcagaattgatattggcagccatctgtgatttaataccggaattattgtaaacaagagtttccacgcctgtgtactggttaggcgtaggggatgaatttctgtggattgaaacaaaataatcagccttagcatcgttggcatcagtcgcttttttaaaaggtgtctcatattcatcagtagtacgggtgtacacaacgtcaataccatttttttctaatatatcacctacggcaagagcgagctttaagttgtcatctttctcagccctgccattatatgttgcaccatagtcgctaccgccgtgtccggcatctacagctatcttatattgagccataatatctccaataacattaatcatattattgtatgcaaaagacataataagcgtacctgtcacatatatttatcttaagatgagaaagaggacagattatgaacgttggatatgtacatacatttgaagtgccagaaaataatattgataaaggccgattgaaggtaagtgttgtcaatgaagaaaatgtgccaattaaaggagcggctgtaagactgtcgtatacaggaaatcctgataatataataggagaaagtggtacagacggagacgggataagtatatttaacgacttaagaacgcctccaattgaatatagcatggaaccggggaacaggcagccattttcagagtatgacatagctgtaagtgcgccaggatttgataatgtaaatatatcaggcagtgatatgttttcgggggagctaagcattcagaatgtaaagatgtctgcaagggataattcacagaataatatagtcatacctgttaacacattatatggagattacccacctaagattgatgaagaagagattaagcctatgggtcagtcgggtgaaattgtgcttgacagagttgttgttcctgaaattgtagttgtacatgacggaccgcctaaagatactgaggcagataattattatgttacttataaggattatattaagaatgtagcaagctctgagatatattcaacatggccgaggcagacaattgaggcaaatgtgcttgctattatgtcatttacattaaaccgggtatatacagaatggtacagaaacaaattttatgattttacaataacatcatcaactgcatatgaccagaaatgggttaatggaagaaatgtgttcgaaagtatatcacaggtagtagatgatatatttgacaattacatatcaagacctaatgtgaagcagccaatacttacacagtattgtgatggaaagagggtgacatgtcctaacagactttcccagtggggaagcaagtatctgggagatcagaattattcatcgattgatatattaagatattattatggtcaggatgtgtatattaatgcggcagaacagataagcggaattccttattcatggccgggaactaatcttgatataggttcatcaggacagaaggtaagacagcttcaggaacagcttaaccttataggagagtattatagttctattccggttctaagtactgatggaatatatggtgagcagacagcagcagcggttaaggaattccagcggatatttaatctgccacagtcaggaataacagatttccctacatggtttacagtatcagaaaaatatgttgcacttgccggactggcagaattataagaatgttaatgaggtatgtaaggctgtcactttgtggcagcctttttaggaggaacatttaaacagcctgtccaagacatgtcttaatgtcatcttccggattgcttataagtcttaactggaaagtgtctacaaggtactgtaatacattagggcttaagaatgctggaagtgtcggaccgagataaatattcttaataccaaggcttaatagagcgagaaggtctgcaacagccttctgctcataccatgaaacaataagagataaaggaagtccattgacatctgtatcaaatgcatctgcaagggcattggcaataagaatagcagaatatacatcattacactgtccgatatcaagaagccttggaagtccggcgactgtgccgaaatcaagcttattgaaacgatatttgccgcatgcaagagtgagaatcatgcagtcatcaggaaccatagtggcaaaatcagtaaaataacttctgccaggtcttgcgccatcacagccaccaatcaggaaaaagtgtcgtatctgttttgattttacggcttcaacaagttcacctgcatgagacagagcagcttcatgtccgaatcctactagaatttcttttacttcctgctcttcggtaaagcctccaagttcaagagactgttttatgatttcagaaaaatccttttcaccgtcaggcttcttctctatatattttatgccatcccagcctacaacattagtagaatatatacggtctttatatgtgtctcttggacgcatgagacaattggttgtcataaggatacagccgggaagattatcaaactgtttttgctggtcctgccatgcgccgccaaaattacctacaagatgcttatattttttaagaccttcataaccatgtgaagggagcatttccccgtgggtatatatattaatgccaaggccttcggtctgtttaagaagcatttcaaggtctttaaggtcatgaccggaaacaatgatgaagggacctttcttaatgtgaacgttgaccgggtgtggtgatggattaccatatatggttgtgttcgcttcatcaagttttttcattatctcaatagccatatcacctgttttaagagtcagacggataagttcttcgacagtcagggtgttatctgttattgcttcgagtgcaatgatatagaaattgtcaacattatcactatagtatgaaagttcccttgcctgatgaccgtaggcgcttattcctttaagaccataaagaatagtctgtcttaatgagcggatatcaggatccagagttttgtcgtacataatgcctgccattggcgcgtcacgcagcatatcagctttagtttctggcagttcgtatgcagcagatggggtaatataatcagttgtccctactatatttttcagattatttttgatgtcctgggattgtttaagaagatggacatggtcatctacattgaaattaacattggtaagagtggtaaaaagacaattctcaataaagctgacaacagatttgtcaacattaagtcctgaatccagaatatgtctggcatagaagctgatacctttcagctggtagataagcaaatcctgaagattggctatttctggcgtctttccgcatacgccgagtttagtgcagccttttccgccggctgtctgttcacattgatagcagaacatatcgtatccaagatccatattattactcatataatactcctttttcattcataattattaattaatattatgaattctgaatatctgatttattcaaaaatttgtatgatatgacaatttaatgatataaaatgtatggtacaatattatatagaaagaatatgtgacggaatccgtcacatccttatgaaaaaggagatacgtgttatgcatatatcaaagaattctgcaactcagattgttgaagaaatttcaaaacttgttaaacagaatattaatcttatggatgagacaggacatataattgcaagtcgtgataaatccagaataggggattttcattatggtgcatataagattatatctgaaaatcttgaggaatattatattgatgaagatgatttatcaaaaggcataaaaaaaggaattaatcttccacttgaacttgatggcggaatagtaggagtgataggaatgacaggtggatatgaagaggttataacgtctggaaaactgttaaaaaagatgacggaaattcttttgatggagagtcgtgcaaactatagacagcttatgaataagcgtgtaaggaatgctttctatgaagaatggcttataaatggaggatataagaatgctgatttagaagaccgtggaatggctttgggaatagatattaataagccaagaagagtgtttattgccagcatagatgagttggacaaccttaaagattcacagcagggacagtctcagattgcaaaatttgagaatgatgttgatgtatttttaaagagaaataattataaaatgcatttcaggaacgcttcaagacagataataatcatagataatatggatacagaagatgtggttaaatttgcagaagagctggcaggatatgtgtgggaaaaagataagtttgaactgaatattggtatagattcagctcaaagctatgatatgcatgaagcttatgttgaagcacatagggcatggacggctgcagctgaaaaacatgaacagattatatgctatgaggatattagtcttgaacttttaataagcaatgtaccgacagagattaagcttgaatatttaaagaaggtattcaaagatatggattataatgatatatgtgaaaatattgcgttgatgaaagcgtattttaatgcacagggatcaatacagaaggcagcagacaatctgtatattcataagaatacattacaatacagaatatcaaaactgaaagaaataacaggacttgatgtcaggaaaccaacagaaagtccagcgttgtatctggcatacataattactgatgaattaattaatgaaaaatatgatttaccattattgttacataatacaaaataaaaatgatattatgtgctgtgtaacattttgctattgaactttacatgctattattgtgtcatacaaagcacaaagatttgtgcaaaccgtacaacaataaaatagaaatgaggtgtttttatgacaggagtagcattgataattgcatttgtcttggctatcattgtgatgatagttgcaatttctaagtttaaggttcatcctttcttagcaattatggcggtatcacttattcttgcaatgttggcagggattccatttgttgatactgtaaaactagacggaacgaaggtgtctggaattccaacagttataggagctggattctcaggtacattcagcagcatcggtattgttattatattaggtgcattgattggatcggtacttgaaaaaacaggagcagcattgaagctggcagatatggtaattaaggtagtaggaaagaaaagaccagaacttgcaatagagcttatgggctgggttgtttcaattcctgtgttctgtgacagtggttttgtaattcttaatccaataagaaaagcacttgtaaaaagaacagcagtttcaagtgtagcaatgacagtagcactttcagcaggactttatatttctcatgtgtttattccaccaacaccaggtccgatagcagctgctaatacacttggagttggagataatcttttacttgtaatgggacttggtgttgtatgttcaatatttcctcttatagcaggtcttgtatatgctaagtttattggaaagagagtaaagagtgctgatgaagtaacagacaatggagaggttaccaagacatatgaagaattagttgcagagtatggaaaacttcctaatggatttaatgcattagctccaattcttgtaccaatcattcttatggcacttggttcaatttcatcaatggctggctggaccggcgcacttgacatagcatgccagttccttggaaaaccaattatagcacttgctgttggtacaatatttgcagtaatccagcttgcaacggcacataagatgtccgatttttacaatattaccaatgagacattaaagacagttggtcctatactttttgtaacagcagctggtggtgtgttaggaaaggtaatttcatcaagctcaatggttgcatttattacacagcatgcagaagtgctttcagcagttggaatattcttcccattccttcttgcagcaatattaaagacagcacagggttcttcgacggttgcaattacaactacagcaggtatcattgctccactgcttggagcacttggacttgcatcacctgttaagacagtgctttgtgtaatggctataggcgctggtgccatgacagtatcacacgctaacgactcatacttctgggtagttactaattttggtgacatgaatcctgaacagggatataagacacagacagtgtgcacattaataatgggtattgcagcaatggttgaaatatttattctttcattaattttataatataaatgttacataatgcggctatacttatgagaactatatggacttatcagtatggtcgcattattatataaaagaaagattataataacaatacatttagaacaatatcaggaggattatatatggttataggctttgttggattgggaataatgggaaaaccgatggcaaagaatctttgcagagttggatatacattgattgttaatgaccatcataaggaaaatgtcgatgaacttgtacaggcaggtgcgagaagtggtgatttaaaacagattggcacggagagtgatgtggttataacaatgcttccaaacagtcctcaggtaaaggatgtaatgcttggggaaaatggtattgcgggttatatgaaaaaaggaacatgttttatagacatgagttcgattaatcctgtcgacagcagatatattggtgatgtattaaaagaaaaaggaattgatatgcttgatgcacctgtgtcaggaggagaacctaaagcaatagatggaacagttgcatttatggttggtggagatgagaaaacatttgataagtataaacagattcttacacatatgggttcatcagttacaagatgtggtgaacttggagctggaaatacaacaaaacttgccaatcagataattgttgcatgtaatatccaggcagtttctgaaagcttcattctggcaaaaaaagccggagtagaccctgagcgtgtatttgaggcaataaaaggcggactagcagggtctactgttatgaatgccaaagttccaatgatgatagaggataatgttgaaccaggattcagagtagatttacatattaaagatttgaataatgcacttgagtgtgctcatagtgttggggctccagtaccgatgacggcacaggttcaggaaataatgcagtatctgcataataatggagatggaagcagcgaccacagtgcaattatacattattatgaaaaactggcaggtataaaattgtaaatattgtttataagctataatggcaggaaggagaatcttatgaatacagaattgagagcggttgcagataatataattgatgcggcaataaaagcagttcttccggatgaagcagttaagagaacacttaatgatactaaatttgatggtaaggttattcttgtagcagtaggaaaagctgcatggcagatggcaaaagcagccagtgattgtattggtgatgtaatagataagggaatagttataactaagtatggacatgtaaaagaaccaattgaaaggatagagtgttttgaagcgggtcatcctgttccggatgcaaactcatttaaagcaacacaggcagcaattgagttggttagcgggctaaataaaaatgatacggttctgttccttctgtcaggtggtggaagtgctctgtttgaaaaacctaaaatttctgggggggaattgcaggatataacgagccagttacttgcatgtggtgctgatattactgaaattaatactataagaaagcgattatcagaagtaaagggaggacggtttgcaaagttatgtgagccagcgcatgtattgtcgatagtactgtcagatatacttggtgacccattggatatgattgcttcaggtccggcgtgtgcagatactacaacatgtgaagaagcaaaacatattgtagaaaaatacaatctgaatgtaagtgagacggttaataagcttatggatattgaaacgccaaagaaactggataatgtaacaacttttattaatggaagtgtgcgtgaattatgcagtgctgtatcaagggaatgttcaaagtatggatatgaaccagtaatgcttacggaccagttatgctgtcaggcaaaagaagccggaagttttcttgcatctatagcaaagacacattgtaagtcaggaaagaagctggcatacatagcaggtggtgaaacgattgttaatattacaggacatgggaaaggtggaagaaatcaggaaattgcattatcggcagcggaaggtattaagggaatgtcaaatgcagcagtattcagtataggcagcgatggaacagacggacctacggatgcggcaggtggatatagcgatggtgatacagcaggaatcttaaagaataaaggaatagatatatttgaagtgcttaagaataatgatgcttataatgcattgaaactaacagaggggcttattataacaggccctacgggaacaaatgttaatgatgtttctgtgctgcttatatcagattgataaggtacataaagcgataaaaatatataatttaattatttattatagtgtaaagccagtattttgctggctttatatttttttaataaattcattagcactcacctcttgacagtgctaacaatgagatgtataacatcaattgtaagaggaaaacaatagataaacagtgaagttaagcattcattgtaatagaaggaggtaatcgtatgaacattaataagtttacacagaagtctattgaggctgttaaccagtgcgagaagattgcctacgattatggtaatcaggagattgatcaggaacattttctgtacagtctcttaactatagaagatagtcttatcgcgagcctgatagagaagatgggaattgataaggacacatttattaagaatattgagactctgcttagccagaagaataaggtttcaggaaatgtacagctttatgtaagcaatgatcttaataaggttttagtaaatgctgaagatgaagcaaagagaatgggggatgcatatgtttctgttgagcatcttatgcttgcgatgattgcagcacctaacaagggtataaagcagctttttaagacatatggaattaacagggaatcattcctgtcagcccttgcgacagtaagaggtaaccagagtgttacttcggataatccggaggcaacttatgatactctcagcaaatatgctacagaccttgtagaaagagccaaggatggaaaacttgatccggttatcggcagagataatgaaatcagaaatgtaataagaatcctttcccgtaagacgaagaataatcccgttcttattggtgagccaggtgttggtaaaacagcagttgttgaaggacttgcacagagaattgtaagaggtgatgttccagaaggcttaaaggataagaagctttttgcactggatatgggcgcacttgttgcaggtgcaaagtatcgtggtgaattcgaggaaagacttaaggctgtacttgacgaggttaagaaatctgaaggacagataattctgtttattgatgaaattcacactattgtcggtgcaggtaagacagaaggtgctatggatgcaggtaatatgttaaagccaatgcttgcccgtggtgaacttcattgtataggtgctacaactcttgatgagcacagagagtatattgagaaagacccggcacttgaaagacgtttccagccagttatggttgatgaacctacagttgaggatactatctcaatccttagaggtcttaaggacagatatgaagtgttccatggagttaagattacagatggcgcacttgtaagtgcagctactttgtcagacagatacatttcagacagattcctgccagataaggctattgaccttgtagatgaggcatgtgcaatgattaagactgaacttgattcaatgcctgcagaacttgatgagaagagaagaaagattatgcagcttgagattgaggaggctgcccttaagaaagagacagataatcttagtaaggaaagacttgatgcattacagaaggaattgtctgaattaaggtctgatttcaatatccagaaagctaaatgggacagcgagaaatcttctgttgatcaggtaagtaagttaaaggaagagattgaccagattaatacccagatagcacaggctaagagagaatatgatcttaataaggcagcagagcttcagtatggtaagcttccacaggcacagaaggctttggaagaagctgaaaagaagtcaagtaacagagatatgagccttgtccatgaaagtgttacagaggaagagattgctaagattatatcaagatggactggtattccggttagcaagttaagtgagtctgaaagacagaaaactcttaatcttgatgaacagctccacaagagagttatcggtcaggatgaaggtgttactaaggtaacagaggcaatcataaggtctaaggctggtattaaagacccgactaagccaattggttcattcctgttcttaggacctacaggtgtaggtaagacagagcttgcaaaggcactggctgagagtctgtttgatgatgaatctaatatagtaagactcgatatgtccgagtatatggagaagtattcagtatccagacttatcggagcgcctccaggatatgtaggttatgatgaaggtggacagcttacagaagctgtaagaagaaaaccatattcagttgttctttttgatgaagttgagaaggcacatccagatgtatttaatgtcctcttacaggtacttgatgatggccgtatcactgattcacagggaagaactgtggattttaagaacactataatcataatgacaagtaacattggttcttcatatctgcttgaaggcatcaatcctgatggctcaattaagccagaggcagaggaagctgttatgggtgatttaaagaatcatttcagacctgaattccttaaccgtcttgatgagataattatgttcaagcctcttactaaggataatatcagcaaaattatcaatcttcttgttgcagatgttaacaagagacttgcagataaagagcttgagattgttcttacagatgcagccaaggatttcatagttgaaaacggatttgacccaatgtatggtgcaagaccgcttaagagatatgtacagaagacagttgagacactggcagccaagttaatacttgcaggcaatatcaatacaggggatgatattgttattgaccttgtagatggaaagctgacagccagagccgctgcgagggctgttcagggataaagcctgatattgaaataaaagcctactaaactattgtgtaatgcaagtttagtaggctttttgaaagcaaaccagcaatttattctttgaatttctgacagcatgctttcacagcatgctttataagcaaaccgcaattgcggtattgacaaaaacttatattaattgtatattaaaaatgatttatggttaaagattcatgacagactgcttgtatgtgaatgaaagagaaagatataacacaaaaggtactggaagataataatgatatatttgcggatattgttaatgtgttgttatttgatggaaagtcggaggttgaagagaatgaacttgttaatacgacagttcattcacagtataaggctgaagatggaaaagttcatgaacaggaacgcgatattgctaagtattggaaaagaggatgtacagacatagtcctgtatggcatagagaatcagacaaaggttgagaaaagaatgccagcaaggatatcgggatatgaaggtgcttcatacagaggacaatatgataagaaaacaatagtgccggtaataacgatggtgctgtattatggtacagatagaaaatggacagcaccaaagaatcttaagtctctgattaaagttccggataatctggataagtatgttaatgacactaaagctaatgtatttgagatagcgtggctgacagatgaacagatagcaaagtttacaagtgattataagatagttgctaatttctttgtgaacaagagaaagaacaaagattacataccagatgataagacaacaattaagcacgtggatgagatactaaagtttttatcagttatgacaggggataacagatatgaagagatattgtcagataaggaaggagtgagcaatatgtgtgatgtagcgcagaggcttgaagacaggggaattgagaaagggcttcagaagggaagagaagaaggacttagtcttggcggcaatcagatgatatattcactggtcgaagataagagcataagtatggaaaagggtgcacaaaagcttggaataagtgtagaaaagttgcgagctaatatgattaatgcgggatacaagtgtccggatatggaatgatagctgataagaaagacagaataacaatataatatataaagataaagcaatgttaggaagagtggatactggcattgcttttctttttttggagaagcctgcttctgttcagggacatacttcgatgtgttcctataagaacaaaaaatagtcaagctatataggtaaaatacaggcagaatcacatgaaattgcaggaatatacatatcaggcaggcacgaggaagtttatctataggcagattggaagaaaaagtgaaggttgaataaggattctgcctggatatgtcctataaatcaagtgataatgcgactacctataggtatcatgaacaacgaatcaataatcagattaagacatatttatacagaactagataaactggttcttttcagtattatattcataattaattgattttaacttattggttatttcttcctcagaaaccatataagatttgcacagttcctctaatgtattgtaattgtctcgaagttgtgtattgacaaagcttaaaagcataacagggtctttaggcatagaaaaatcctccttatattgtgttttcagtgatggctctattgttgtactatttagtacagcatgaatattttcccatattaagcatattctgtaaatgtaaggcttgtatataaaattgtattaaaataaatacatttatggttgcacgaaaacgattactatgttataattttaacaagctaagaaatatactacttaaataactgaatatcaaattatggaggttttgttatgggaaagaaatgggtgtatttgtttacagagggtaacgcagatatgcgtgaacttcttggtggtaaaggtgcgaatctggcagagatgactaatattggtcttccggttccacaggggtttactattaccacggaagcttgtacccagtattacgaggatggtagagagatcaatgatgagatcatgggacagattaacgaacatatcgagaagatggaacagattacaggcaagaagtttggagatatggagaatccacttttagtttctgttcgttctggagcaagagcttctatgccgggtatgatggacacaattcttaatcttggacttaatgaggatgttgttaatgtaattgcacagaaatctggtaatccaagatgggcatgggattgttatagaagatttatccagatgtattcagatgtagttatggaagttggcaagaaatatttcgaagagcttattgacaagatgaaggatgagagaggggttaagcttgatgtagagcttacagcggatgatcttaaggagcttgcaacacagtttaaggctgaatataagtctaagattggcaaggatttcccagatgatcctaaggaacagttatacggagctataaaagctgtattccgttcatgggacaacccaagagctaatgtatacagaagagataatgatattccttattcttggggaacagcagttaatgtacagtctatggcatttggtaatatgggggatgactgtggaactggtgttgcatttacaagagatcctgcaactggtgctaaaggactttttggagagttccttactaacgcacagggtgaagatgttgttgccggagtaagaactccaatgcatattcaggaaatgagtgagaagttcccggaagcatttgagcagtttaaggatgtgtgtgcaactctggaagaacattacagagatatgcaggatatggaatttacagtagagcatggcaagctgttcatgttacagacacgtaatggtaagagaacagcacaggcagcattaaagattgcatgcgaccttgtagatgaggggatgagaacagagaaggaagcagttgcaatgattgatcctcgtaatcttgatacacttcttcatcctcagtttgatgcagctgcacttaaggatgcaactccagcaggaagaggtcttggagcatctcctggcgctgcatgtggtaagattgttttttcagcagaagacgcagaagagtggaatgcaagaggagagaaggttgttcttgtaagacttgagacatcgccagaagatattacaggtatgaaggcttcacagggtattcttactgtaagaggaggtatgacaagccatgcagcggttgttgcaagaggtatgggaacctgctgtgtatctggctgtggtgatattgcaatggatgaagctaataagaagttcgcacttgcaggcaaggaataccatgaaggagattatatatctattgatggtacaacaggcaacatatatgatgggcagattcctacggttgatgccaagattgcaggagagtttggaagagttatggagtgggctgataagtacagaaagttaaaggttcgtactaatgcagatactcctaaggatgccaagaaggcaagagaacttggagcagaaggtatcggactttgccgtactgaacatatgttcttcgaagaggacagaattgcagcattcagagagatgatatgttctgatactgtagaagaaagagaagcagcactggataagattctgccatatcagcagggggatttcgaagcactttatgaggcacttgaaggtaatcctgtaactatcagattccttgatccacctcttcatgaatttgttcctacagaggaagaagatattaagaagttagctgaatcacagggcaagtcagtagagactattaagaatattattgcaagtcttcatgagtttaatccaatgatgggacacagaggatgccgtcttgcagtaacatatccagagattgccaagatgcagacaagagctgttataagagctgcaatcaatgttaagaaggcacatcctgactggaatgttaagcctgagattatgattcctcttatctgtgaggttaaggaattaaagtatgtaaagaagactgttgttgagacagcagatgaagagattaaggcagcaggaatcgaccttgaatacgaggttggtactatgattgagattccaagagctgcacttactgctgatgagattgccaaggaagccgatttcttctgctttggtactaacgatcttacacagatgacattcggattttcaagagatgacgctggtaagttccttaatgcatactatgaatctaagatatttgagaatgacccatttgcaaagcttgaccagaatggtgttggtaagcttatggagatgacaataaagcttggaagaccggttaatccgaatcttcacataggtatctgtggagagcatggtggagatccttcatcagttgcattctgccacaagattggtcttgattatgtgagctgctcaccattcagagtacctattgcaagacttgcagcagcacaggctgcaattgcggaagagaaataatccaatttctgaccataacacgagtttcggggcatggaaagcgaaagcttttcatgccccgaaatgtttaaaaaggaatattttctcattgccctaaatcttattatgttctataataatatgaaaataaaattgattggagcgtattatggaacaaaagaaaattgaacctattcgtgatgccagaaagcttggtaaagcgaagatgctgattcttggtattcagcatatgttcgccatgtttggcgcaactattcttgtacctattctggtatcaggatactttcaggctgcctgcggtgaggagcttaccagaggtctgtctgtatcagtaacacttttctgtgcaggctttggtacattgatattccacctgtgtactaagttcaaagtacctgcattcttaggatcttcctttgcatttcttggtggattctacacagtagctaatcttgacagcggtatgtatgctggaatgtcagctaatgataaggctgcttatgcatgtggtggtatatttgttgccggaatgctttactttgtacttgcacttataattaagcttgttggagtcaacagagttatgaaattccttccacctgtagttacaggacctatcattatatgtatcggtctttcacttgcaggttcagctattacaaatgcatcagctaactggttacttgcatttgttgcacttgctgtaattattatattcaatatatggggcaagggacttttcaagattatccctattcttatgggtgtagtaatttcatatgtatttgcacttattcttaatgcatgcggagtacataatcctgatggttcagcgatacttaatttctcatcaattgcatctgcttcatgggtaggaattccgaagttccagtttatgaaatttgatgttacatcaatccttgttatggcaccgattgctattgcaacaatgatggagcatatcggagatatgtcagctatttcagctacagttgaagaaaactacttagcagatccgggacttcacagaacacttatcggtgatggtgttgcaacagcatttgcaggagcaattggaggtccggctaatactacatatggtgagaacacaggagttcttgaactttctaaggtatatgacccaagagtaatcaggattgcagcagtatttgcaattatactttcattcatacctaagttttcatcagttatatcaactatgccaacagcaattatcggtggtatatcattcatgctttacggtatgatttcagctatcggtgtaagaaatgttgttgagaacaaggttgaccttactaagtcaagaaatcttattattgcaggtgttatatttgtatgtggtttaggcttcggtgatggacttacatttacaatcggtggaacatctataacacttacagcactcgcaattgctgctatagcaggtattcttcttaatgctatattacctggtaatgattatgaattcggtaagaatccagcaggtgacagcagccgtggagtttatgttatgaatacagactctgatgaggaaaagccagaagaggctgagtaaatacattgagtaattatattatataatttggaggtacttaataatgatggattttgagaatgagaagaatataactatatttacacatccacttatccagcataagatttcaattcttagagataagaaaacaggaactaatgaattcagaaagctcgttgaagaaatagctatgcttgaaggctttgaggctttatcagaccttccgacagaagatgttgagattgagacacctattgaaacttgtatgacacctatgatttcaggccgtaagcttgcaattgttcctattttaagggcaggtcttggaatggttcctggtgtactttcacttgtaccaactgctaaggtcggacatatcggaatgtaccgtaatgaagagacacatgagccggtaccatattactgcaagcttccacatccaattgaggaaagaactattgttgtaacagatccgatgcttgcaacaggtggttcggcagttgatgcaattgaccagataaagaaggttggcggaaagcagattaagttcatgtgtatcatagctgccccagagggagttgaaaagcttcataaggcgcatccagatgttcagatatacattggacatcttgacagagagcttaacgcagatgcttatatttgcccaggacttggggatgccggagaccgaatcttcggaactaagtaaataattatgggcatgtaattgctttgcgttaagagatatgataatgtgtaaaatgcggctcccaacgggagccgtttttgtaacttatattatttaattaaggagatttcgatgagcagagaggaaaacagaagaaatttttctaaatatgtatctcagaatatccttggaatgataggattttcatgctatgttcttgctgactcatattttatatctatagcaaagggagcagacggacttacagcattaaatcttgttatgcctttatatagtataatattctcgataggtgagatgattggcgtaggttcagctataaggtatgcgattagtaagataaaaaaagatgcagatgcagatgattatttctggaatgcattaatatggtgcataatatcaagtatgatattcgtttttgccggaatatttttctcagcagatatcatgcgtgttctgggagctgatgaacatattgtggcagttgggaataattacactaagatattcatgtgttttgcaccgatgtttatgtgtaactatgtgactaatgcatttgtgagaaatgatggagccccgggaattgctatgagtgcaacactttttagcagtctgtttaatatagtgtttgactatattctcatgttcccgatgaatctgggaatggaaggtgcagcactggcaacagctttgtcgccgattataggtatgggaatatgcagcatacatttcttctctaagaaaagcagtgtcaggcttgttgtgtgtaagccttcagtaagaaaacttgtggcaggaagccagcttggtgtatcggcatttgtaggagagatgtcgtcagcggtcattacacttgcttttaatttcgtaatacttaaactggctggtaatgtcggagtagctgcatacggagttgtggctaatattgcaattgtcacaactgcggtatttaatggtgttgcacagggaagtcagccacttataagcagttgtttcggcaggggagacaaggatggatgtacacagttaaaacgaatgggatatacaacagcatttgtacttgcagcggttatgtatagtatattgtttatatttgcaggacagtttgtcgcagtgtttaacagtgaaggttcagaaatgttaaggctttacgcaacagaaggcgttaagttatattttattggaatattctttgcgggaattaatattgtaggtggcggtgcattcagtgcaacagaggatgcgtttaaagcggcagttgtttctgtggcaagaggatttgtgctgattttaggtgcagtttttgtaatgtcagcactttttggaatgacaggagtatggcttgcgtatgctgttgctgagggaataacaacatttataatgcttgtaatggtgctaagagtgtgatagaatatttgcggacaaaattatcccagagattgggaaaatatgaaaggagtctatataattatgagcaatattgcagacaaatttgaagaacttggagtaattccagtagtagtattgaatgatgctaaagatgcacttccattagctaaggctttagttgatggtggtcttccttgtgcagaggttacattccgtacagcagcagctgaggaatctatccgtcttatgcatgaagcatatccagatatggtacttgcagcaggtacagtacttacaacagagcaggttgacagagctgtagcagctggtgcttcagttatcgtaagcccaggatttgatccagaaatcgttgattactgtatttctaagaacattcctgttatgccaggtatcgttacaccttcagagcttgctcaggctgttaagagaggccttacaagagttaaattcttcccagctacagctgcaggtggaattaagatgatcaaggctatgtgcgcagcttacactaatgtaagaatcatgcctacaggtggtatcaacacagctaaccttgaggaattcttatcatgcgataagatcttctgctgtggtggatcatggatggttaagggtgatatgattaaggcaggagaatttgacaagattaaggatatgacagcagaggctgttgctcttgttaagaagatccgtggctaatcaccagtgattgttaatatcaaagatacatataaaccccgtattctgttttgcaggatacggggttttgtacgtatattatgttttttagtgaattacagattagaaaatatattctcaatttcttcatggggaagtacaagggcaaatcttacatgaccttctccaaggcttccgaagctgcttccaggtgtacataaaacgccagtcttattaagaagttccataacataatcagctgaactggtatagccgtcaggaatggcagcccatacaaacattgtgcctttaacatcagcaggtttaagtccaagctttttaattccggcaacgagagcatttcttcttaactcatattcagcacggttgtcagcgacatatccttgcggaccgttaagtgcagcaacagcagctttctgatatataaaacttgttccatagtcgaattgtgagcggacagttttgaatttgcttacgatttcacggtttccgataagaaatgaaaggcgcagaccagtaagattataagtcttagaaagagagttgaattcaactccgacttccatagcaccttcgtggcttaagaaagagccaccaatctgtccgtcatatataatctcagaatatgcgttgtcgtgaataataatgatgttatatttcttggcaaatgcgatgagtttatcgtagaattcatcaggtgcagtagcgcatacaggattcagaggataagacacaaccatcattttggctttttttgcagtatcttcatcgatagaatcaaaatctataagataatcattctctgggagaagattgtaataagcaatctgtgcgtcacacaggaatggtccaatctcgaatataggatatcccggattaggaactaagcataaatcaccagggttgcacaaagcaagggcaatatgagccatgccttcctgggttccgaatacagaggcgacttcatcaggtgtgataacggtgttgtaacggcgtttgtaccatttgcatacagcgtcaagcaattcatcagtatcaccaagtgagtacttgtaattctcagggtcaagtgctgcctctgaaacaaccttcataacagattcatcaggcttgaaatcaggagttcctacagtaaagttatataccggctttccctgtgcaagtctgtcattctttttctgattaagtatattaaaaatgttgctgccaaagcggtcagctctcttagaaaattcaatattcatatgtatactccatttctttaaatgcgtatctgcatgcattttattcagacccgaaatatagaaaaatttcaagcctatcgaataagatactagcataattaacaaaagtcaattttaaggtgtattttttggtgaaaatgtgatagttttatatatgtaagtagaaataaataagatatggcggtctgcaaatgttacatacaggaacattaaacggtagaatgcagacagaaaggaaaggtagaagatatgtcagtacaggattatcttagtgcagtaaagattggtaaaaaagaatatcatgcgtgtgtaaataagggtacgtacccatatcttccggttttggaggatattattgatgaaaacagtattgacagagaagttagtcttggaagtgaccagattccgttaagacttgtggttggaacatgtacagcaggtagaactactgcatttgcagacaacttcatgcctatacttgactggggaacagaattttcagcaaagtgggcttcgcttagcgacagtcaggtgaatgaaggaataagagacgatattaaagtatatgagtacatgaataagttctatgtgcttgaaggtaataaaagagtcagtgtacttaaatattttaaggcggtgacagtaagtgcacaggttataagaaagatacctaaatacagtgatgatcctgatgttaagatatattatgaattcatggatttttataaatctaccaagttaaacgatatatatttcagtaaagagggcagttttacaactcttatggagctggttggaattacaccaggagaaccaatggatgaggatgataagaaagaccttgtttcgtgctatcttaatttcaggcttgcttatgaatcaagaggaggggataagtttgatttcccaacaggagattcatttttacgcttcattcatattcacggatatgatgctgttaagaagatgactaagtctgaaatggcaaagaatgtcgccaagacatgggctgaattcgagcttcttgatgacaacagcgaagtggaacttaagatgacgccggcagcagcacctaagaagaatatattaagctatctgcttccaatgggtggaggagttaagaagcttaaggttggatttgtgtatgaaaagacaccgcaggattcagagtggtgttatacacatgagcttggaagacagtatattgatgatacatttggtgaccagatagaaacatatgttgaggagaatgtgataccggagcagaatgatgaggcggcaattaacagacttatagagaaaggatgtgaccttatattcgtgacatcttcggcgatgaatatggctggacttaaagctgcaatagcacatccgtcagtaaagattcttgattgttctcttaacatttcacataaatatatcaggtcatattatgcaagaatgtttgaagcaaagtttataacagggattattgcaggttcactggctgatgacgataatgttggttatatagctgataatccggtttatggggcatgtgcgaatataaatgcatttgcattgggagtaaagtttgttaatccaagagccaaggtttaccttgaatggaacagtattaaggataatgattcagaggaaaatcttgctaagaagaatataagcattatttctaatcaggatatgattactccgggcaagagtaagagaaagttcgggttgtataaagcgagtgattcggataagcacctggctatgcctgtatggcactggggagttttttatgaaaagcttatacagagcattatgagtggttcatggagtaaggatgaggacggcgataatgtaaaagcacttaattactggtggggaatgtcggcaggagttgttgatcttatatattcagagagtctgccatcagcaactaagcgacttgtaaagctctttgagaaagaacttaaggaagcaaggttcagagtgtttgagggtgaattaaaagatcagcagggtaatataagggttgaagaagggaagcttattgatccggaacatataattactatggactggctgcttgataatgtggttggcagactgcctcggtatgatgaacttacagataatgctaaattaaaaatggcacttcagggtgttgtcaaagaagaagaatagaaagcatgctgcctgcagtggtggctggggaattattaatgaaaatacttgtgttagcggatgttgaatcaaagtacttatgggattatttcgaaaaggaaaaattggaaggtatagatcttatactttcagcaggggatttaaagccccagtatctgtcgtttcttgcatcattttcaaaagtacctgttctttatgtgcatggaaatcatgatgactgttatgatatacagccaccggatggatgcattgatatagagaataagatatatgtgtataaaggtgtccgtattatgggacttggtggttctatacgctataagaagggaaagaaccagtatacacagaaagagatgaaccacagaattaataaaatgtggctttcaataaagaagaacaggggctttgatatactgcttacacattcaccggcagcgggaataggtgacggacctgacgaaccgcataagggttttgagggctttaattatctgttggaaaaatataagcctaagtattttatccatggtcatatccataggagctaccagatgaagtttaagcaggaatatgagtataatgagaatactaagataattaatgggtatgagagatatatatttgaatatccggatgtttaatctgcaccgtggcatattagcttaccagcaaatgtgctacggtgttttacatatttttgacatattttcacatgaaatacataaaaattatgaatatggtacctatttcctacttaacatacatgtactttttgagtaaaagttgctaatataacgacataaccccttgctggttaaagcaaaatgcacaaaaaaatgtattgaggaggaaaatcaaaacatgaaagctattattagcaaagcagctcgtagaaaatgggcatgggtacttgcattggttatgattgtgagtatcgtgattcctacatcacttcttacagcgaaggcggatgttggaacagttaaatttattgatggtgcggcaggatggttagagtcagcatatgcacagtggaccattgataatcaggcagaaggatatacagcatatatcaagaaagccagtcagtcagattctgcttatgcaagaatcgacaatgaacttatcagaaagtataagaactactacagggttgatgcagtaggacttgcggcaggtgactatgttattaaggtagttcctgtaaagaacggaaaggaagttactgacaaagcacaggttactaagacactcaatgtaagttcttatgacagatccggatttgcattttcatctgaatcaaaatataaaacaggttcaggtgcttacaatgagaatggaacacttaaggcagatgcgattgttctttatgttactaacgataatgcaaagacaattaaggcatcagtaaaagaggcaaagggagagaaggaatatacaggtcttcagacaataattgatgcatatacaaaaagtgctagcaaggggatagaaacaagagcacttgatgttcgtgtaatcggatgtgttacagatactgcaatggataagttttcaagttcatctgagggagtacagattaaaggagctagtgcttattcaaatcttaatatgacaatagagggtatcggagatgatgcaacaatcaatggattcggtttcctcttaagaaatgcaggaaatgttgagatgagaaatttctcaattattaatttcatggatgatggtatttctctcgatacagcaaactgcaatgtatggattcacaatgttgatctgtactatggtaaagcaggtggggatgctgaccaggcaaagggtgacggttcaattgacattaaaggtaattcacagtatataacagtttcatatgtacatttttatgactcaggtaagtgctcattatgtggaatgaagagtgagtctggtcctaactatattacatatcatcataactggtttgatcattctgattcaagacatgcaagagtaagaacaatgtcagtgcatatgtataacaactactatgatggcaatgcaaagtacggtgctggttcaacaatgggttcttcattattcatacagaataactattttagaaactgtaagaatccaatgctttcatctaatcagggaacagatgcacttggtgagggtacattctcaggtgagaacggtggtatcattaaagcatatggaaatgttatcgtaggtgcacagaagattatctatgcaaatgctgtttcagaaacaggtgattctgcaaatgcggcatcatttgatgcataccttgcaaagtcagcagatgagaaagttccatcttcatataagactgtagcaggtgcaacatcttatgataactttgatacaactaaggatctcggagttaaatcaggaagtcttaataatgcagaagatgtaccttcagtagtaacatctgcaaagggagcaggaagccttggtggtggagtgatttcatggacattctctgataaagatgattctgtatatgccatagataaggaattaaaggcaacagttactaattacaagaatacagaccttgtttctgtaggtggtactaatgcgaagattgtttcaccagatccaacaacagaagagactaaggcaacagagagtacaacaaaagctacacaggcaacaactaaggaaacacagacaacaacaaaagcaacacaggcaacaactaaatcaacagaaagcgcaacaaaggcaactgaaaaggaaacaacgggttcagatgcaacaacatcatatgataagacaagcctttcttattcaggtgcgtatacagatatcagtaagaagaaagatgcagatttcaagaatgcaaagtatgtatcatcttcaaatgaaattcttaatgcaatcagttcagctaaggctggtgatgtaattattgtaaaagagggaacatataagttctctgatacaattgtaattaataatgccatgaatggaaaatcaggctcttatattattgtaaaggctgaaagtggcaaggaagttaagtttgatttctcagcacagaagcttgacggagctaacagaggtgtagttgtagatggagattactggtatttccagggaattaatttctatggtgctggagataacggagtattacttgctggtaataacaacatttttgaaaaatgtgtatttgaagcaaacagggattcaggtctccagatttcaagatatgatacaacagcaactactaaagatttatggccatcaaataacctgattattaactgtacatcacatgataattgtgatttccctgaacaaggtggtacaggtgagaatgcagatggatttgctgcaaagcttacatgtggtgaaggtaatgtatttgacggatgcatatcatacagcaactcagatgatggatgggatttatttgcaaagagtgcaacaggtcctataggtgtaattacaattagaaactgtgtggcatttaataatggaacattatctaatggtgttcattatgctaatggagatatgaatggatttaagcttggtggttcaggtgttggaactccacataatgtaatgaattgtctgtcatttgacaatggtgcaacaggatttacagataataataacccaacaggtcttacaattgtaaatgttacagcatggggcaatggaaagtatgctaagaagggtaacttcttatgttacagaacatcaagtgcagcaatatttaagggacttgtatcagctggtgcaattgattcagataagtttactggtaaaatggctgattcaatatattacaattcaggtaagtattataatctttcaggctctttgtttacttctttagtaagtggagataagaagggaactgttgtaactgaccctgctaagacagctggaatgtttaagaacactgttaatgcaatcgatatgagcaaaaatatagataaacagcttagaaattctgatggaactgttaatatgaacggtctctatgagacaataggaagttatgcttcaatgggagcaagattcaatgttgctaatcagatgattagtgtatcttcaaagaattcatcatctgaggtaactaagccagaagagacaacaaaggctcaggaaacaactaaggcgacagaggcagcaacaaaggcgacagaggcagcaacaaaggagacacaggctccaacaaaggcgacagaggcaacaacaaaggagacacaggctccaacaaaagcaacagaagcatcttcagtatcaacaaagggtgaaaaattaattcttaatgctaatgatgtttcaacaggaaagattaagagttcaactgtagttgatggtcttaggattgttgcaacaagcaaaaagactgtaacagttgataagagtgataaggattacaagaatatcagctttacaaagagaatcaagcttggcggtgcaggaagcgaatctgcaagagcaattgcatttaagacagcaggtgaatctaaggtaaagatatatgcaacaagctcagatacagatacaagcagacttattaagattattgataagaatggtaatgatgtaacaagtacagctaaaatacctggttcttcacttaaatcagtatcattcagattggatgaggcaggtgaatattatattgtatcagaatctggtggagttaatatttattatgtagaagtatctaatggtatagcgtattaatattttgtgaatttccccgcactatgtgcggggatttttttgtaaaaacattttatggtaaaatatacacaaatacttgaccttgacattggttcatagtttacaatttgaacaaataaaagaaaggaatgatctttgttatgaaaaacaaaaatagaagacgaatcagttgtctgcttagtgcagttcttttgcttgttatgagttttggttttggcacatttgcaggagctgaggaatcagattcatcaaagcctgttgtctggattgtgggagattcgacagtcagtgctttcacagacaattattattatcctagatatggatggggaacacagatcgataagtatctggatggaacttttgaggtaaagaatattgctttgtcaggaagaagttcaacaagctatacagcagataaggagtataatgagcttatagctggaatgaaaaagggagattttcttcttgttggtttcggccacaatgatgaaaaagcggagagtggaagatatactaaccctaatggagattataaaacagcaggttcatttgctaattctttatatgagaattatataaagccggcacagtcagcaggaacaacagttgttttatgtacaccgattgtaagaagaactgctgatggcaactggtctgacagtcagcttcatgttacagctgcttcaggagagtttgaaggaggaagttatccacaggcaatcattaatcttggaaaagatcttaatgttccagtggttgatatgacttctcttactaagaaattatatgattcattaggagcagccgagacagttaatttacatgcatggacatcatcaaagccagaaagtgtagacaatacgcatactaatatctggggcggaacatataatgcatatcttgttactaagacaattaaggaacttaatgtagctggacttgcagagcatattattgatgctaaagcaccaactaagagtgatgttttaaagtctaatcctgattataaagagtcagaatattcaaatgatttaaaagacagtgaattatgggctaatgcaggaatctttaagggaactgtatttggaaatgttggcggcaatgataagatagcatctaaattcaagcttgagagtctggataatggtaatatcaatattgcagttaacggagcaggaaagatagcaagtactgctgatggaattgctatgtattattacagagttccagcaaacagtaattttacaattacggcaaaggcgactgtgaacagttttacatctaatgatcaggtatcatttggtcttatggcaagagatgatatgtatgttgatcagaataataataatactttaggtgactatgttgcagctggtccacttaagcttactaagaaaggttctgtatggaactgttttgcaagaaagagtggcgctcttacacagggaggaacatgtgctaatgagattaaggctggtgagacatataaccttaaaatcgaaagtaatacagatggttatgcatgtacatttggtaatgaagaaactattacaggtggttttgattttaaattaacttctgtagattcagaatatgtatatgttggaatgtatgttgcaagaagtgctgatgtgacattttcggatgttaagcttgttgttgatggtaaggagattacatctgcaggcgaaccagaaaatccaacaccaggtgaaccggagaatccaacaccaggtgaaccggaaaatccagcaccaggcgaaccggaaaatccaacaccaggtgaaccagagaatccaacaccagcagaaccagcaccagagcagcctgttaaaccagagacaccggcagagcagccagctacagagccagtggtatcagataataatggtgttaagacaggtgattcataccatatggtatggtatattgctgcaatgacattaacagcaggaattgcatgtgttgaattaaagagaaagaagacatttgataaataagcttataagaatttacttctcctaatatttccagaaaaagcttccggttaactgccggggctttttcatttttacattaaaaaatatatttttattaagaaaaatcttaaaatatttaaaaatggcttgcattatcctataggctgtgatatattttcttagacacaaaaacaaatgtccgtcacagaaagacagaacagagggaagtgtcttttagattttacatattgaaggagttaaaaatgagcgataagttaagagttggtatccttggtggtacaggtatggtaggacagagatttataacattacttgagaatcatccttggtttgaggttgttttagtagcagcttctggacgttcagcaggaaagctttatgaagaggctgttgacggacgttggaagatgcagacaccaatgcctgagttcgttaagaagatgactgtatatgatatggataaggattttgatgaaatcgtttctaaggtggatttcgtattctgtgcagttaatatgcctaaggaccagattaaggctatagaggaaagatatgctaaggcagaagttccggttgtttctaataacagtgctaaccgttggacaccagatgttcctatggttgttccggaaatcaatccagagcatcttgaagttattaaatatcagagagaaagacttggtactaagagaggatttatctgtgttaagcctaactgttcaatccagagctatacacctgctcttaatgcattaaaggaattcggaccaaagcttgttgttgcaacaacatatcaggcaatctcaggtgctggtaagacatttgaacagtggccagagatggttgagaatatcattccttatatcggtggcgaggaagaaaagtctgagaaagagcctttaagattatggggtaagattgaggacggaaagattgttcctgcaagtgatccggttatcacatgccagtgtatcagagttccggttcttgatggacatacagcagcagtatttgttaactttgagaagaagcctactaaggaacagattattgaaaagtggagaagctttaagggagttccacaggaacttaatcttccaagtgctccaaagcagttcatccagtatcttgaagaggatgaccgtccacaggttaagcttgatgttaactatgagaatggaatgggtgtttcacttggccgtttaagagaagatagtgtgtttgattataagtttgttggtctttcacacaacacattaagaggtgcagcaggtggagctgttcttattgcagagcttcttaaggcacagggttatatcactcctaaggatgcagaataattaaattctaatacacataccagaaaagagatgtcagagatggcatctctttttacttgcttaaaaacctattatgatataaaattatgaaacgacttaaagagttaagaggggacatttacattgaaggaaaattatttttatgcaatgctgtcgagaatgaaatatattaacagatggggacttatgcagaatacacgccatgagaatctgtgcgagcatagtcttgaagtggcattcatagcacatgcattgggaattatcaacaatgagatatatggtgggaatattaatgctgaaaggcttgcaattcttggaatgtatcatgatgttacagagataattacgggtgatcttccgactcctgtaaagtattacaatccggttataagaaatgcttataaggaagtagagcatgttgcagaggagcagatgctctcaggtctgtcatctgatataagagcacattataagggtgtgttatcagagacagaagaggaagaagaactctggaaatatgtaaaggcggctgataagatgtcagcttatatcaaatgtcttgaggaaaagaagtctggtaatatggattttgctgatgcggaaaagacaatatatcaggctattgttgatatgaatattccggaagcagattattttataaaagaatatataccagcttatatgggaactcttgatgcttcaggagaataataattgtgtaatagacacagaaatgagggatataatgggaaaatccgtatatatcgcggaaaaaccaagcgtggcgcaggagtttgccaaggcactgcatgtgaacttcacaagaaaagacggatatcttgagggtggagaccatattgtgacatggtgtgtaggacatctggtaactatgagctacccggatgcatatgatcctaatctgaaaagatggagctttgacaccttgccattcataccaaaggaatttaagtatgaggttatacctgcagttgcgaaacagtttaatatagttaaagacattcttacaagggatgatgttgaatatatatatgtgtgtaccgattcaggacgagagggagaatatatatacaggcttgtgaggcaggaggcaggcgttaagggaaagaaagagcgccgtgtgtggattgattcgcagaccgaggaagagattcttaaaggaattaatacagccagagatatatctgaatatgataatctgagtgattcagcgtatcttcgtgcgaaggaagattatcttatgggaattaatttctcaagagttcttacattaaaatatggacgcaatattgctaattacctgcaccttgacagggcagttgtatctgtcggaagggttatgacatgtgttcttggaatggtagtaagaagagaacgggagataagaagctttgtaaagacaccgttctacagagttattggacaggcacaggctgaaaattcaacatttgatgcagaatggcgcgtaagtgataaaagtatgtatgccggtacgccatatttatataaggataatggttttaaggacagggaaaaggctgaggaactggttaagttcttatctgatccactgccggcacagggagtagttgattctattgagagaaagaaagaaaccaagaatccaccgcttctgtacaatcttgccgagattcagaacgaatgcagtaagctgtttaagataagccctgatgagacccttaatattattcaggagctgtatgaaaagaaactggttacttatccaagaactgatgcgagagtgttatcaacagcggtaagtaaggaaatacataagaatataggcggacttaggaattttccccctgtgaaggagatagcagagcatatattacagaataatatgcagaagggaattgaaaagacaagatactgcaatgataaagcaataacagaccattatgcgattattccgacaggacaggggtttaacaatttaaagaatttgtcagttacagctgcgagaacctatgagataattgtaagaagatttttaagtatattctatccaccggctatttatcagaaggtaagtattaccagtgatgtaaagaatgaaaagctgtatgcttcatttaaagtgcttgtagatgaagggtatcttagcgtagctaagaactcatttgcaaaggcgagaaatgatgcaaaagtaaaggatgatgatagcgtcgataataaggaagataataaatgtgatgcagctttatttgaggtattgaaaaaatacagaaaaggttctacaatcacatttaatgggtttaatatcaaagaaggtgaaacatcacctcctaagagatataattcaggttctattattcttgcaatggagaatgcaggacagcttattgaagatgaggagctgcgtgcccagattaagggtagtggaataggaacaagtgctaccagagctgaaatccttaaaaaacttaatactattaagtatatttctattaattctaagacacagattattacacctacatttttaggtgagataatatatgatgttgtagataattctatcaggcatctgcttaatccggagcttacggcaagctgggaaaaaggacttacaggtgtagcagaggggaatattacagcagatgagtatatggaaaagcttgatggttttgtttcgagaagaacaagggctgttatggcattaaggaatcaggcggggcttataggactttttaacgagaccgctaagaattataagtaaatgagtgaaaggaattaaatatatgtgcggaattgcaggatatgtaggggacagagaaagcgcagatgtacttgtagatgcattatctaagcttgaatacagaggatatgattcagcaggtattgcggtatttgatcatggtaatataaaggtcaagaagtgcaagggaagacttgccaaccttgttgagaagatggatgaagaaggaaaaccacaaggacatgttggaattggtcatacaagatgggctacgcatggagaaccatcagacattaattcacatccacatggcaataagagagttactattgtacataacggtataattgagaactataagaagcttaaggattttcttgtcggagagggatatagctttgcaagtgaaacagatactgaggttgctgcaaagctgcttgattactattatgatggtgacccgatgaagactattgcaaaggtactgtcagagattaagggttcatacgcacttggaattatgttcagggatttccctgatgagatatttgcagtaagaaaggacagccctcttattgttggcgttggagaacatgagaatttcatagcatctgatgttccggctattattcactacacaagagattattaccttcttgaccagaatgagattgcagttattaagaaggattcagttaagatatacgatgttcatggtaatgagatacataaggaattaaatactgctgactgggatgttgatgctgcagaaaagggcggttatgcgcactttatgcttaaggaaattcatgagcagccagattctgtaaagagaacaatcatgccaagaatcatggacgatatgcctgatttcagtgcagaaggattcaatcctgataagttaaagaattataagaatatatatattgttgcctgtggtactgcaatgcatgccggaatggtcggtaaatatataatagaaaagatagcaagagtatctgtaactgttgatattgcatcagaattcagatacagagatcctcttattagtgaagatgaccttatgattgttatatcacagtcaggtgagactgctgatactaaggctgcacttgaacttgcaaaacaggcaggtgctgatactatggcaattgttaatgtcaagggttcgtcaattgcaagagaagcagatatggttgtatatacacatgcaggtcctgagatttcagttgcttcaacgaaggcatatatggttcaggtatcaattatgtatttaattgcatttgaattagcttatgctaatggtaagatggatgaggcagaatgcagcagatacactaagatgcttgaagaaatacctgaggttattgaagaagccattgcacttgagagtaggtgtcagtttgcagcatccaagcttattaatgcagacagtcttctatatataggacgaggtcttgattatgcactcagtatggaaggttctcttaagttaaaggagatatcttatattcattctgaatcatatgcagcaggagagcttaagcatggaactatctcgcttattacagaacagatgcctgtaattgcaatagcaacacagaagaatcttgaggaaaagactataagtaatattaaggaagttaagtcaagaggtgcatttgtagtgcttattgcagaaccagagcttgatattgaggatggagtggcagatattgttattaagcttccacaggcagaccagcttcttatgcctatggttgcggcagttccattacagcttattgcctactatacagcagttcttaagggtaacgatgttgataagccaagaaaccttgcaaaatctgttactgttgaataattgatataaagaggatattagatatgaataacgatgtattaaagataagtaatctgtatgaccttaatgaaactattgcggcaaaagtgtttgaaggctgtacatatccatgggaagtacttgcaaagattggtgattttattgtagaacttggcaattcactgccagaagatgaatatgagaagcgtggggagaatatatgggttcacagaactgcaaatgtatttccatcagcttatattgcaggacctgcaattatcggtaaagatgccgaggtaagacactgtgcatttatccgtggaaaagctattgtaggtgaaggcgctgttgttggtaattcaactgagcttaagaatgtaattctttttaataaggtacaggttccacattataattatgttggagattcaattcttggattcaaggctcatatgggagcgggctctataacttctaatgttaagtctgacaagaagcttattactattaaaggacctgactgcaatattgatacaggtatcaaaaagattggtgcttttcttggagataatgttgaggttggctgtggtagcgtacttaatcctggaacaattgttggaagagagagtaatatttatccgctttcaagcgtaagaggctttattccggcaggatctatatataagaagcagggcgaagtagtaactaagagataattatgtgaaatttttgttttattaatgtaaaaatgttgtgtctcacattgactaatgcaaaagtttgtgagaaaatagtcaaggcttggacgacggcttctggccgtcgtttcatttatagtaaacactatgaattacgaaaggagtaataagatgatttacacacaggaagtagagaatatgtgtccagtagcacagggcgttcatcatggagcagctccagtgccaacagaaggtaaatgggtacagaataagaaggttgaagatatttcaggttttacacatggtgtaggctggtgtgctcctcagcagggtgcatgtaagcttactcttaatgttaaggaaggtatcattcaggaagctttagttgagactatcggatgttcaggtatgacacattcagcagctatggcagcagagattttaccaggacttacagttatggaagctcttaacactgaccttgtctgtgatgcaattaacacagctatgagagagttattcttacagattgtttatggaagaactcagagcgcattctctgagggtggacttgcagttggtgccggtcttgaagatcttggtaagggacttcgttctcaggttggtactatgtatggtacattaaagaaaggtcctcgttaccttgagatggctgaaggttatgtaacaggtatcgcccttgataaggacaaccagattatcggttacaagtttgtcagccttggtaagatgacagacttcattaagaagggtgatgaccctacaacagcatatgagaaggcttgcggacagtacggaagagttgcagatgctgttaagattattgacccaagaacagatgaagaagttaagtaaggaggacaattagaatggctttatttgaatcatatgagagaagaatagataagattacttcagttcttaacagctatggtatagctagtattgaagaagctgaaaagattactaaggatgccggattagatgtatatgctatggttaagggtatccagccaatttgttttgaaaatgcatgctgggcttacacagtaggtgcagcaatcgctatcaagaagggtgcaagaaaggcttcagaagctgctgcagctatcggtgaaggtcttcaggcattctgtattccaggttcagttgctgaccagagaaaggttggtcttggacatggtaacttaggaaagatgttacttgaagaagagacagaatgttttgcattccttgcaggtcatgaatcattcgctgctgctgaaggtgctatcggtattgcagagaaggctaacaaggttagacagaaacctcttagagttatccttaacggtcttggtaaggatgctgctaagattatctcaagaattaacggattcacattcgttgagacagagatggattattcaacaggcgaagtaaaggaaatctctagaacagcatattcagatggtcttcgttctaaggttaactgctatggcgctaacgatgtaacagaaggtgttgcaatcatgtggaaggagaatgttgatatatctatcacaggtaactcaacaaaccctacaagattccagcatccagttgcaggtacatataagaaggaaagacttgaagctggaaagaagtacttttcagtagcttcaggtggtggtacaggacgtacacttcacccagataacatggcagcaggtcctgcttcttatggtatgacagatactatgggacgtatgcactcagatgctcagttcgcaggttcttcatcagtcccagctcacgttgaaatgatgggattaatcggtatgggtaataaccctatggttggtgctactgtagctgtagctgtttctattgaggaagctgctaagaacggtaaattctaataaaaagtaattgacaaaatattggagagcaacaggtgataaaaacctgttgctctcttttttaatgcttgacttttagtgaaaatgtggatattctttacggaatataaaagaatgagagataatgaaaggaagattatgaattttttagttaataaaatacttgatgatggtagcgtttcatatggtcttacaggctcaggatatgtggtattaataattgtctgtgtcttattaatgactataggatgttttgcaagagataataatagtaaactgaatgtaaaacatattgcatttgcagcaatggctatggctcttgcggttgcgacttccatgattaaagttattaaactgccaatgggcggttctgtaacactgttcagtatgttattcatagtgcttataggatactggtatggaataaagactggtctgacagcagctcttgcatatggagttttgcagttattacttgatccatatatcctgaatattcctcaggtgcttcttgattatatattaggctttggagcacttgggttgtcaggagtattttctaaatcaaaacacggtctagtgaagggatatattataggagttataggcagatttatatgttctttcttgtccggctggatattctttgctgtgtatacaccagaattttttaatagtgcggtactttattcagttgtttacaatggctcgtatatcggacttgaagcagtggtaactcttgtagttatatccctaccttctgttaataaagcactggcatatgttaaaaataatcttgtatagaataattggataaataatataaaaaactcatgcagattgtggtaaatgtgattacttcaatctgcatgagctttttataagtcggcgtgacaggatttgaacctgcggcctcgtagtcccgaaccacgcgctctaccaaactgagccacacgccgatatttaaatgtgacttatatattatagcgtatttatgaggaagtgcaagagaaagaataaaatatatttatatatatttatacgataaaaataactgctatattgactttagaaacgatatatgatatatactatataaataatattacgcaatgcgataataaggtgggaatgctattgcaaataggtttaagagtagtatataataaatatataagacaaatgaaatcactctatccttatatgtggtattacctgccgtaagtaaaaaggggaagagtatggggaatttaaaagaatattcaaaagaaataaaagaaacagcagctaatcttagaattatagatgacgcactgtttagattgatgggagaaaagccgggtgtatgtgaagaaatattaagaacacttcttgatatgccacatttacatgttgtgaaggtttctgtacagagtgtggtccagagctttcaaagagaaataacattagacgcgttatgcatgacacaagatggaagatattgcaatgttgaggtgcagaagggaaattccaatgatgatatcagaaggacaagatttcatgcggcagcgttgacagcaaaatatacacctaaaggtgctggttttaagaatgttccagatgttacaattgtatatatatctgagtatgatgtcttaaagaataatcagacagtgacgcatgtaacaaggtgtatgaagaatgatgaaagttacgttccagtgaaagatggagaagatataatatttgcaaacacttgtgttaatgatggctcggacaaatcagaactattgcagttaatgcttaataaagaagcattttataatgataagtttccacagattagcaatgcgataagctatttcaaggagacagaaggaggtcagagtgaaatgtgcaagatagtagaagattatgctaaagaatatgcaaagaattcaatacaggaagcaatagaagcgaagaaactggcagatgaagcaaagaaactggcagatgaagcaaagaaacttgctgaagaagaaaaacgaaaagctgaagaagaaaaacgaaaagctgatgaagaaaaacgaaaagctgatgaagcggagagcagagctggcaaagcaattgaaagaaattatagattaatagtgaatatcctatcaggaagaacatatgaggaagcggcagacatgttagggatatcgatagaagatgtgaaagaagcagaagcagcgataaaggttattgataaataattagtgtctgtagttgcaatgatgagttatttcggaccggttgttgcacttgataatcttgtaagtacattgcagaacacatttgcagcaggaaacagagtgttggatattcttgatgaacgccggtaactaaggatatcacaggttgtgaggaagttgaatttaattgtgcagctactgaaaatgttacattctcatatggtgaggaaactataatttctgatgtatcaattccggttctaaaaggaagcattattggaatttcaggaagaagcggaagcggtaaatcaacaattgcaaagcttgacgcaacagatgagaagataattgaggcgtgcaaaaaggcttcagtacacgatttcatatcaaagcttcctgatggatacgacactaatgtcggtgaactgggagatatgttatcaggcggagagaagcagagaatcgggcttgctaaagcattttacatgacgcgccattcgtgcttcttgatgagccgacaagtaataaagtcgagacagaataaacttgcaaaatgtatcttaaaggggcaaaatatactcgtattatttcattgattaaaggtaagaaagaaggatagatatgggacacgaacttactaagaatgatatcaaaaagatggaagaagagattgagtacaggatacatgaggtaagaaaggctgcacttgatgatgtcaaggagacaagggctcagggggatttaagtgagaatttcgagtatcatgcagcgaaaagatttaagaataagaatgaaagcagaataagatatctgcagagaacgattaagaatgcgactgttattgatgattcatcagcagatgatgaggttggcgttaataatacggttgaggtattgtatgaggatgatgaaagtactgagactattaaaattgttactacaatcagagctgattcattaagcggtatgatcagcatagagtcgcctcttggcaaggctcttcttgggcataagaagggtgacagggtgcttgtacaggttaatccacaggttgaatattatgttgttatcaagagtatatctaatactgatgattctgatgatagtataacaagttattaataaataaaaaaatatattattaagttgacataatggcggcatacttatataatcttagtatacatttgtttgcgtaagattattataaggggtgccgcttttgcagtttaatgaagcacagattcaggctatacaacataatacaggaccgtgcatggtaattgcaggaccgggttctggaaagaccacggttcttacacacagggtaagatatctgattgagaggtacggcgttaatccatcagatattcttgttattacatttactaaggctgctgctgaacagatgaagcttaagtttaaggggttgtcagagggcagaaactctgcagtgacgtttggcacatttcatgcagtattttttacaatacttaaggcagcatataattattctgcacactgtattattaagccgcagatacagcatgaattcgtgaaagaccagatgtgcaggcttgaactggagtatgatgatgagaaggaaactgtagctggtgttttatctgagataagctgtgttaagggtgaagctgttaatatagatgaatatgagagcagaagtattccaccacagagcttcagaatgatatacagggcatatgatgatatgcttgtaaggaagcatctgattgattttgatgacatgatagtattgtgccgtgatcttctgatgcagagagaggattacaggatggcatggcagaataaatataaatacattctgatagatgaatttcaggatattaataaggcacagtttgatgttgtgaggattcttgctgacggatacagaaatcttttcgtggttggggatgatgaccagagtatatatggattcaggggttctgctccacagataatgttagatttcaataagtattatagtgatgcagtgagaattggcatgtgtattaattacaggtcaacaggcaatattgtgtttgcttcaagggctgtagcagaggagaatgagcatcgttattataaagatataacgacgtacaattcacaaggagatactgtgtctgtatatgaatttaacagtctgaatgatgagaaagcatttcttgtatcagagataagaagactgattgatactggaatagcagctgatgacattgctgtgttatcaagaactaatgtaattgggaatatgtatatgtcaaggcttgaaagtgatgggattccatgctgcgattattcagtagtacaggatatatatgagcactggataagtaaggatgttcttacatatataaggatagcacttggcagcagggaaagaatagactttctgcggattattaataagccgctccgatatataagccgttcatatattacacagccggcagatattaatgcattgaagagaggctatgaggggaatgaacagatgagtaaacgggtagaaaaactggtgtctgatattagtatgataagaagtatgtctccatttgcagctgttaattatataagaaagggtgttggttatgatgagtatataaggaattatatatatgaacacaaggctgataaggaagaattatataatgtgcttgatgaactggcacacagggcttcacagtatatgagtctgtcacaatggcttgatggtattgcagaatacataaggcagtgcgataaagacagacagaataatacagcagacggtgtgcatatgcttacaatgcacggctctaaaggtcttgaatataagattgtactggtaatggatgtctgtgagggaataataccgtataataaggcggttttagatgagcagattgaagaggagaggagacttttttatgttgcgatgacgagagcaaaagaaaagttgtatcttctgtaccccaaacagaggtacaacaaagatacaacccgttcacgctttatagaagagcttcttactgctcgttatcctcttcttcgtacagatcttcatactccatagcatctaattcttcgtcaaatgcttcagatacaagctcatattcttcatcagattcaatattctcaagtacaggttcgttgtcgccttcaaccttgtatctgtaaagatatacctcatcgttgtctgcagcttcaccctcaagtggaagaagtgcgatatagtcgttatctccagcagggaatatgcgtattattgcacattcacattctgtgttatcgtcaagcataagagttactgtgttatattcctgattattattctccataatgtctccgttctgccagtaatggctttagtattttctctactctaacaaatattatgtataaaagcaatgaaaataaagaaaaaacacttgctattttattatgtaaggtgtatattatgtataagttaataatttaagtcaaaggggacgattttagcaacaacgctaggattgtcccctttttggttaaattaatagcatttacaacgaatattataatctggaggttcacgccatggataaaatcgataagaagataattacattattacagcagaatgcaagaatgccattaaaggcactcgccgagaatgttttcctttcatcaccggctgtttcagcaagaattgagagacttgagaaggaagagattattgaaggatatgaagttaagattaatcagttaaagctgggatatcatataacagcatttattaatcttgaagttgctcctgtgcagaaaccggatttctatccatttatcaagtcatgccctaatgttgttgaatgtaactgtgtaacaggcaattattcaatgctattaaaagttatgttcccaagtaccatggaacttgatacatttatcggccagcttcagaagttcggaagaacaagtacacagattgtgttctcaacacctgttgctccaagaggtattgatgttaatcaggagatgcctacagataattaaattcatcaaaagttcataattatttaacctattaacactgtcagacacttgctgttctggcagtgtttttgttataattatctgagtttaaatttcgtgttacgaggaggtattatgagtaaggcttcagatatattagataatgtaagtaaggtgattgtgggtaagagaaatgtttcagaacttgttctgacaagtattattgctggtggacatgttctccttgaagatgttccgggtacaggtaagactatgatgtcgaaagcatttgcaaagagcattgatggacaattttcaagaattcagtttacaccagatctgcttccttcagatattacaggtgtgcatgtgtttaaccagaaagagggggaattcgtattcagaagaggtccggtattcgctaatgttattcttgcagatgagattaacagggcaacacctagaacacagtcggcattgcttgaatgtatggaggaacatcaggttactgtggatggtgaatattctaagttagaagaaccatttgttgtaattgcaacacagaatcctatcgagacagcaggaacttatcagcttcctgaggcacagcttgacagattccttatgaagattaacatgggttatccagagaaagatgatgaggtacttattcttaacagattcttaaaagaagatccttctaaagaactttcaacagttgcaacatgtgaagatattgttgcaatgaaagaagatgcgaaaaatgtatatgttcacccagtgcttattgattatattgttgaactggcaaggatgacaagacagcaggataatgtatcaatcggtgtaagcccgagaggaactcttggtatgctcaatgcggcgagagcatatgcgtatgttgcaggcagagattatgttgtaccagaggacatcaagatacttgcacctgtagtatgggcacacagaattgtgttacagacaggttacatgaatatggataataaagaacagattgtagaacatgttgttaataacacagcagttcctactgaagattggaaaagataatgaatgtattattgatgcttattggtgtacttatagtatatctggcaattaagcttgtatttcgttataactggaataaggggctgggtgtcgctcttgaatttgagaaaaagcatgttgtaaatggcgaaacagttaatgttgttgaggttatatccaacgaaaaacgtctgccgctgccatgtgtgaatcttaagtttcaggtggacagggaacttgaatttcctggaacagatactaattcaagtgtgtcagaccttacataccgcaatgatgtgttctcatttctggctaatcagagaattacaagaagaattcctgttaaatgcaatcacagaggtgtgttcagaatatcaggagtacagcttacatttgccggaccatttatgaatgagattaatgttatcaaagtgggtagtacctgtgagataacagtttatcctaagactgtggatagtaagagattcagctttataagaagcagaatatcaggagaagcagaacgtaagaaatatatgcttgaagatccatttgtgttcagaggaataagagattatacaagcaacgacagcctaaagaatgtgaactggaaggcaacagcgagaacaggtaatctgtgtgttaatgaatataatgagtcaatcagccgtaatgtatgtattcttcttaatcttgaggatgatggaatgcttacatatgattcggttaatgaagaagcaataagtcttgcagcttctgtggcagaagaattcatcagacagggaattaatgtctctctaattagtaatgcatgtgatgttgacacaaaggaagcagttggtataagagaaggatcaggagttggacatcttggaagtattaatactgtacttgcaagaatggatttaaagcttgaaaaagaagagtttgcagcgtttattaacagaacatttataaaaaatgtttctgtccagagtagtgacaacagtgtatatgttgttatatcagcgagcagaagaaagaagctgcagcagactatgcagaagtttgagaaaaagtatggacaggttatatggattgttccatatatgactggtggagaatacagccttgattattgtggtatcagaccagagggctgggaagtgaaataagtttatcaggagataacatatgaatgagtcgggacaagtttataattataataaactgagaacaataagaacattgacagatataataagccagtgtattgtagcgttcgcattttctgcatttgttatattgggacttacgaataaatctgacagttatattattgcaacacttcttatggcagttccggttattataacttatgcggcaagaaagaatatacataagaattttctatttatgctgattcatgctgctttgcttataacagccattataattggtaatggagatgcagagtctacagcatattttgtaagtgtacttgctgtgtgtataaggtctgtaagcataagagtggctaatgcaagaaaaactgaatatatgaatgaaccgctttatgggaatcagtttgctgatgtaactcaggaagacaagaaagctgccttgcaggcaggagagagaatgtcacctctgtattgtctggttatggtcgcaggaagtctttatggcggttcagcaggcaacagactgcttgttaactatgaaacagtattatttgtgctgtttgttctgcttgcttttcttgctaaccagttaaaagagcttaattctctgtttataagtaatgctggcaaatcagaatttcctgctgagagaattacaggaattaacatgataatggtcatggttgtgtcaggacttatgattcttggcatgattctgttctatagtggggattatggcaatatatttacactgattggttcaggttttgtagcagttgtaaggatagtgctgaagctgttcttaagacttataagagagaaagaagaagtctctacgatgcccgaagattccgtgaatccagtcactgatgatgatgtggtaaagggagataacgaccttgcatttactgataatcctgttatgagtgcattatttacaacatttgcaatagttcttgtaattgcacttgttgtatttattgtctatatgattatcagatatgccaagaatttcaaaaagtcacaggataataatggtgatgagattgaattcattggcaatgacagaagaacagaagcaaggataaagagacgtcagagagcagaagaagctaagaatatgcctgttaatatgcagtacaggaaggcattcagaaaagcagcaataaaatcatcaaaggcagccagggattcggatggtaaatcacttgaaaatatgcagccacaggatataacaagaaacagaataactgccgatgcagaggcggcagacagaattactacaagttatgagaaagcaagatattctgataagaatatttccaaagaagaacttgaatttatgcttgactttataaaaaatgacaagtataataagcgtacataataagtaaatgctgtgaagaggactattagataggaaccagagtcagagaactgccgggtggtgcgagacagtcgaaggaacttattgaactcgccttggagctgctacctgaaatcattatgagaagtaggagtagccggaagccaaccgttatagtggacagaatataatgcagcacatttgttgtacgtattcagtgagtgcatagcatagctatgaagaagagtggtaacgcgtgagatttatctttcgtctctttgggtggaattgcccatggacgaaagatttttttatgcttatctttaaggaagcctttacttattaacaatacatatttatattttcaggaggttttaggaatgtttgattacagacagtatgaaagaggctattttatgccaccagttaagtgcaatgactgggttaacaaggagtatgttgataaggcaccaatctggtgttcggttgatttaagagatggtaaccaggctcttgttgaacctatgagtcttgatgaaaagcttgaattcttccagatgttagttgaagtaggatttaaagaaattgagattggttttccggcagcttctgagacagaatatgagttctgccgtacacttattgagaaaaatatgattcctgatgatgttacaatccaggttcttacccaggcaagaccacatattattaagaagacatttgaagctgttaagggagctccaagagcaattgttcatgtatataattctacttcattagcacagagagaacaggtattcaagaagtctaaggaagaagttaagcagattgctattgaaggtgccaagttattaaaggaacttgctgaagctgatggaggaaacttccttttcgaatacagtccagagagctttacaggaacagaaccagagtatgcacttgaggtatgcaacgctgttgttgatatctggcagccaacacctgataagaaatgtattatcaatcttcctgctacagttgagatgtcacttccacatgtatttgcaagtcagattgaatatatgtctaagcacatgcacaacagagagaatgttattatttctcttcatccacataatgaccgttcgacaggtgttgctgatgcagagttaggacttcttgcaggagcggacagaattgagggaacactttttggtaatggtgagagaacaggtaatgttgatataattacacttgctatgaacatgtatatgcagggtgttaatcctgagcttgatctttccgatatgccacatcttgcagaagtatttgaaagacttacacagatgaagattgatgaccgtcatccatggtgtggtaagcttgtatttgcagcgttctcaggttcacatcaggatgctatatctaagggaatgcattacagaattgaaaatgatcctaataaatggacagttccatatcttccaattaatccggaagatgtaggacgtacatatgattcagatgttataagaattaatagtcagtctggtaagggtggtgttgcttatgttcttgaacataactatggaatggttgttcctaaggctatgagagaagatctgggttatgctgtcaaagatgtatcagatgttaatcataaggagctttcagcagatgaagtgcttgagatatttgagaagagatataagaaatatacaccagtattcaagatttctgaagtgcatttcaagcagattaatggaatccagactgttgtgactattgatgagaatggtaagaaatgcaatgttgaagatggcggtaatggtcgtcttgatgctgtaagtaatgctcttgccagtcactttggaaagccttgtgatatcttctgttatgaagaacattcattaaagaagggctctgattctagtgccattgcatatgttggtattacaggagaggatggaaagaattactttggtattggtattgaccatgatatcatcagagcttctattgatgcgttagagtcagctatgaacagaagccttgaagcataatatttaaattgaataatgtgtaatataacccatgtccggaacgtatactagaatgatactgattcaggatatgggttgttttatttatgtagaattaaaaaatccccctcaaagggggaagcggtactatagtactaatgctattatacgctcagaggggaaaagaaatatagttaaggggaaactgttgatttagacatttttggagggatagtaatgttttttagaaaactattaagtagtttgaatgcaaaggttaagaaaactgcagttggtgttctttcagttgcaatggttgcaggttctgtgtttgccggtacatctttaaaagctggtgcatactcgaaaacacaggatgtccttaatgaattattaggagcagcaaaaccttatggtgtagttgctgaagaatttaagaatagtaatcacaatcagacatgtttcgcgactaacaagcttgtaataacagatcagtggatgagtgcatggcttgatatgagcgttggaacaacatatatcaagagttttgataattctggttcatcagaagttaatgtggatagaaatgcatttaataatcttgtacttggaactgattatgattatgaacccagagagaataaatattatattaaagattctgacggaaaaagaacaggtgctgttattaatgttgctaactgcaaggatacaatcaatgtttattatgcagaggattatatggatgtaactgcagcacttgataatgtatacgataatttcaaggcgtatgcagatacaccagattcggaggctgatatagttattggtgcttatgatgatagaaagattgatctttcttcatttaagaataagcagattgtagtggtaaatatgtatgctaataattatattgactggcagggaaaagaagtttcatcttattatggagaaggacagctcaacataacaaataaagcacagggacagtttgttatcattaatcttcttggcggtgatggtgatgcagatatcaaaagattcagcattaatggtaagaatacaggtggattaacagatgttgatatatcagacacggttattttcaatgctgttaatgtaactggtaatattaatataggtgaggtatgtggtatagttgttgcaccaaaagcagatattaccttaacatctacatgtaatggaagagcaatttctaagtcatttgttaatgtcaatggacaaatgcattttatatcagataatcaacagcaggagacgacacaaaaggaaacaacatctgtagcacagtcttcatcagaaacaacaaagtcagaagagacaacaactgcacaggaaacaacaaagtcaaacgagacaacaactgcacaggagacaacaaagtcggatgagacaacaactgcacaggagacaacaaagtcaaacgagacaacaactgcacaggagacaacaaagtcaaacgagacaacagttgcacaggagacaacaaagtcaaacgagacaacagttgcacaggaggcaacaaagtcgaatgagacaacagttgcgcaggagacaacaaagtcgaatgagacaacagttgatgctggtaaggaaactaagccgacaaaaccagaatcaaacgaaacaacagctgttaatgagacaacaaagtcaaatgaaacaacagtagattctaataaacaggcaaaagaacatacaacttcatcaactcaggtcacaaagaagactggtgaagttgcaggagatgaagaattagttataggaaaagaagatgagactgttggtggctcaagagtcagaaaaactggtgaagttgcggctgatgaagaggttgtaaagactggtgacaataatcatgtatgggtatatattgtgattcttgtagcagcagctgttatttctggaactgttattgtgataagcaaaaagagcaataaaagataataaatgttaatgatatcagagaggcacagcagtaatgttgtgccttttttattggggtggtattgaagcactctgcttttttatgctataatgcaatatgtatgagtcgaagtaggctttgaacacaaaatacagtgaagaacaaggagatggaagttttatgaaacatttgatacttgcatcgggttcaccaagacgaagagaattaatgagtcaggtaggacttgattttactgttgttacaagtgatgcagatgagaatattaaagagatggagcctgaagattatgtaagagaattatcttctattaaggcacagtctgtattagagcaatatgcagataaagataattctgtaatcgttataggtgcagatactattgtttatcataaaggagagattcttaccaagcctaaggatgaagaggatgcattcagaattcttaagtctttagaaggtcagatacatcaggtgtatacaggtgtaactatatgcagcacacataagaatgtaagtttttatgaaaagactgatgtgtgggtatatgatatgactgatgaggaaatcagggattacataagcacaggagaacctatggataaggctggtgcatatggtattcagggaaaatttgcagcatacattaagggtattgaaggcgactataataatgttgtcggtctgcctgttgccagacttgtacatgagcttaaagcattttaaggagaaaatatatggttaaattcgtagcaagtgaccttgatgggacattgcttcttaacggagcacagagcgtcgacgaatctgctatacagtatatcaataaacttgttgacaaaggcgttatatttgcaccggctagtggcaggcagataacgagtcttaagagactttttggggctgtcagtgataagcttgcatatattgcagagaatggtgcacttgtggaatataatggtgaaactattggaaagactgcgatggataggaagcttgcgttagagataattgaggatgtaattgaacagcccaattgtgaggtgcttgtatcaggagaacatacggcatatattaagcctaagtcagaagaatattattacagaatgaccaaggtggtcaattaccatactacattagttgataagttcacagacattgatgaggatatattaaagatagctgtgtgtgatatgacaggaattaagaattccaaggagcattttattaacaaatggagtgataaggcttcagtactcgtatcaggagaactttacttagaccttatggatactaatgtcaataagggaagaggaattgaacagatacagaaatatttcagcttaaagcctgaagaatgtatggcatttggtgacaactataatgatattgcaatgctagacagggtgtattactcatatgttatggagaaagctgtagatgatgttaagaaacacggacgtttcataacaggatgggtagaaggaacattaagagagcaatttaaagagataagataaggagatttaagttatggataaacatattgatgagtgtgcaaaggtgtttttaagagatcagaaacagctttttgatgaacctgttgcatatgatttagaggaggctaaggaattcttagaggattgtatggcggtgtattgtaaagatattaaagaattaagagaagtgatggatgatgagggaatggacgtatctgacttaagcaatgatgagcttcttgagcagttagaagtgttcaggcttgataatggcggatatttcttcgtggaaggatagtacagatgcgtataactgttgtatgtgtaggtaagattaaggaaaagttttatacccaggcagttgaagagtattctaagagactttcaagatactgtaagcttgatattgttgaactacctgatgagaaaacaccagataatgcaagtgatatagtcaatgaacagattaagaataaggaaggggagagaattctttctgccattaaagatgatgcttatgtatgtgcacttgcaatagaagggaaaatgcttgattctgttgaactatcagaaaagattgaaagacttggaatagaaggaacaagtaacataacatttgtaataggaggctctttgggacttgcagatgatgtacttaagagagctgattataagctgagtttttcaaagatgacatttccgcaccagcttatgagagttattcttttggaacagatatacagggcttacaggattatgaagaatgagccatatcacaaataattaaagaggatagaatatgaaaagaagaaaaaaaccatttattatattagcagttattcttgttgtagttttattggttgcaggatatattaagttctttaatggacgtctgatatatttcacaacaggtatgaagagcggtgagcttattaagacagcaggacagaagacaacttatacatgcgaggcagatattctaatgtctgatgtgaagaaggaatatgaggaaatgtttggcagtaatatatggagagagaaaattggtgatgctgattttgaaagctatattaaggaccagattaagagtaagttaatgcgcgtcaaggctatgaatgttaaggctaaggaacgcggtgttgtgcttggaagagaagaaaaagattctgtgggtaaggctgttgatgcattttacaatgaattaacagaatcgcagataagcagtacaggaataactaaggataaactgaatacaatgtttactgaatttgcaatagcacagaaactctacgatgaccttacttccagcatggatattgaagtaagcgcagatgaggcaagagttattgatatccagtatattgtatcagattcagaggaagatattaataaagcatataatcttgtgaattcaggaagttcattctttgctgttgccaaggagtacaatgcggatggcgaatatgagtacgaactgaaacgtggcgagatggatgcagcatttgaaaaagcagcattcaatctgtctactggtgagatgagcagtatagttgaggcagcaggcagatattacattataagatgtacatcggataatgataaggctaagaccgaggttaataagtctgcaattcttgaaaagagaaagttagagcagtttaatgctgattttgagaaatatgaagctggtatatatatggaatttaataatagcgaatggaagaaattaagtattcaggatgcgtatacgttgggaagcagctttgaggatactttcaatgcgtattttggaaagtaaagaggagagtaattaataatggcagctaataaatatgatgctaacagtatatcaatactggagggccttgaagcggtaagaatgagacctggtatgtatattggaagtgtcggaacaaaaggtcttaatcatcttatatatgagattgcggataattcagtggatgaacatcttgcgggtttttgtacacagataaatgtaactcttaatgatgatggaacagcaactatcaaggataatggacgaggtattcctatcggaatccatcctaaagccggaatacctgcggttgaggttgtatttacagtacttcatgcaggcggcaagttcggagatggcggatataagatatcaggaggacttcacggcgttggtgcatctgtagttaatgcactttctgtatggcttgaggttgagataagagttgatggtggtgtgtacaagcaaagatacgagcgtggaaaagcaacagcgccgcttgaaaagattggtacatgcagaaaaaatgatactggtacaactgttacatttcttcctgatggagaaatatttgaaaagacaagattcaaagcagacgcgataaagagcaggcttcatgagactgcatatcttaatccggggcttacaattgagtttgaagataagagaaagggcagcgaggataaggaaactttccatgagcctgacggacttaaggcatatatcaaagaccttaacaatggcaaagagacagtatgcgatatcgtctactttaagaagaagcaggaagatattgaggttgaagcagcatttcagtttgttaatgaatttgaggaaaatattcttggcttctgtaataacatatacactcaggagggtggaacacatattacaggctttaagaccaagtttacaatgattatcaaccagtatgcaagagaacttggcatcttaaaggataaggatgcgaatttcacaggtcttgatgtaagaaatggtatgactgcagttgttgcagttaagcaccctgcaccaagatttgagggacagaccaagaccaagcttgataatccggatgctggtacagttgttgcaaatgtaacaggagacgaggtacagctttatttcgacagacatttggacgaccttaatgctgtaattgcatgtgctgaaaaatctgcgaagatacgaaaagcagaagaaaaggctaagacaaatatgcttacaaagcagaagttctctatagacagcaacggaaagcttgccaactgtgagagcaagaatccggaggaatgtgaggtgttcattgttgagggagattcagctggaggttcagcaaagactgcaagaaacagaagaactcaggcaattcttccaatcagaggtaagattcttaatgttgaaaaggcaagtattgataaggtacttgccaatgccgagattaagacaatgattaattcattcaactgtggattcttagagggctacggtaatgactttgatattagcagattaagatataataagattattatcatgactgatgccgatgtggatggagcacatattgatacactgcttcttacatttttctacagattcatgcctgagcttattaatcagggacatgtatatattgctacaccacctctttataaggttgttcctaagaagggcgagggtgaatatctatatgatgacaaggcacttgaggattacagaaagaagcatacgtcaggaacatttacacttcagagatacaaaggacttggagagatggatcctgaccagctatgggagacaactcttaatcctgaaacaagaattttaaagcaggttgagattgaggacgcaaggcttgcaactgaggttacagcaatgcttatgggtacagatgtaccacctagaagagaatttatatatacgcatgctaatgaagctgagattgatgcgtaaaagctaaaggagtagaaaatggctgagaagattataaggactgagtattctgaggttatgcagaagtcctatatagattattccatgagcgttattacagcaagagcacttcctgatgtaagggacggtttaaagccggtacagagaagagtgctgtatgccatggaccagttggggcttaattacgacaagcctcacagaaagtctgcacgtatcgttggtgatacaatgggtaaataccatccacatggtgacagttcaatatatgagacactcgttgtactttcacaggattttaagaagggtatggctcttgttgacggacacggaaacttcggttctatcgaaggtgacggagctgccgctatgcgatatacagaagctaagttaaaaaagttcacacaggacgtatatcttgctgaccttgataaaaatgttgtggatttcgtgcctaactttgatgagacagaaaaagagcctgaggttcttcctgtaagagtacctaatctgcttgtaaatggtgcagatggtattgcggttggtatgacaactaatatccctccacacaatctttcagaggttgttgatgcagtatgtgcatatatggataatgaggatatcacaacagacgagcttatgcagctctgccctggaccggattttcctacaggcggaattgtaattaataaaagcgagcttggtgcaatatatgagactggaacaggtaagattaagttaagaggcaaggtcgtattcgagcctgccaagaaccgttctgagaaggacaagcttgttattacagagattccatatacaatgattggtgctaacataggtaaatttatatctgatgtagtaagccttatagaaactaagaaaactaccgatattgtcgacatttccaatgaatcttctaaggaaggaataagaattgtccttgaacttaagaagaacgctgatgtcaagaatcttgaaaatcttctttacaagaagaccaagttggaagatacatttggcgtaaatatgctggctatcgttgatggaagacctgagaccttaggtattaaggatataataaaacaccacattaatttccagtatgagcttgctacaagaaagtacacaacacttcttgaaaaggagaaggctaacagggagattaagggaggtcttataagagcatgtgatattattgaccttattatcgagatattacgaggcagtgctaatcttaagatggcgaaggactgccttgtcaatggtaatgtcgagggaatcagattcaagtcagagcagtcaaaaaagcaggctgcaggtcttgatttcacggaaagacaggcaggagcaatattagaaatgcgtctgtacaagctgattggtcttgaaattcttaatcttcagaaagaatatgatgaatgtgtcaggaagattgagaagtatgaaaagatacttggcagcagaaaagagatggcaaaggttatcaaggctgaccttcttaatattaagaaggaatacggtgttgaaagaagaaccgtaattgaagacggcgaagctgctgtattcgaggaaaagaagattccagagatggaagttatgttcatcatggatagattcggatatgcaagaactattgatatggctgcatttgagagaaataaagaggctgtatttaacgaaaacaaatatgtcattccggtaatgaacacggataaaatctgcatatttactgatacgggagatctgcaccagttaaagataaaggatttgccattcactaagttcagagataaaggcacaccgattgataatctgtgtaactatgacagctctaaggagataattgtgtacattactccatttgaacgacttaagaatcagaaaatgctttttgtcacaagacagggaatgatgaagcttgtagacagcgaagaattccaggttgcaaagcgtacagttgcatgtacaaaattagcagatgacgacaagctaatcggaatgtattcaacagacgcaagagtagagatttattcaaagttctcacttgatggagaaatcaaggaagaagaggttgtcgagagcaaccagaatgtaattgtacagacagaaaacggagtgttcttaaagttcccattaacagacattccaatgaagaagaagagtgctgttggcgtaagaggaatcaagctttcaaaagatgattatatagaagatgtattcctgcttacagaaggtgacgagttcacaatggaatataagggcaagagtatcagctttgcaaagatgaagacggcacacagagatactaaggggactaagataagagtatgattttaacggttggggagtcgaagaagtgcttcacactatcacaactaaggtaagcggttctagtggctgtatatggcggcataacacccacaccgacagcttacaatttagttgtgatggtgtgaagcacttcttcgacatgaccaccgataaaaaaagtatatttttctaaaatataaatggatagttagttaaattgtttttgggttggcgagactacatttgaaagaataatttgaccagcgaggtcactttgttagtcagaatatggtatgggattatccataccattttttaaatactggagacatatggcatgaaacaaaatcggtacttcgcggtggtagtgtctgtgagttaagcgttagcgacaacggaatgtaagcttaccgtgtgggtgttaatgccgctatatacaaaagttcggtgcaggaaatctcgttcaagcgaagcgcgtttgatttcctgcaccgtaataaactctgtatatggcggcatttacagccactaggtcagcttacctaaagttggcactaatgcttgactcatagactgtacaaccccgaaatactatttaattatcttccatatatttatcataaatagcaataaccttattcataacctccggtcccggagcaccaagagtaagtctcttatctacacaagtctgaaggctgatagcctcgtagatatcttcatcaaatacagggcttacagccttgtattcttcaagtgaaaggtcatcaagcgcaatatttttctcaatgcacataagaacaagctgaccgacaataccatgggcttctctgaacggaactccctttttaacaaggtagtcagcagcatcagtagcattagtgaagccgttctttgctgaagcttccattctcttattattgaatttcattgtatcaatcatgcccttgaaaaggctgatgcagcctttggctgtgtcaaatgcgtcaaatgataattccttatcctcctgcatatccttattgtaagcaagaggaatacccttcattgttgtaagaaggctcataagagcaccatatactctgcctgtcttacctcttacaagctctgcgatatcagggttcttcttctgaggcataatagagcttcctgtactgaaagcgtcatcaagttcgataaatctgtattcgttagaattccagatgcatatttcctcagaaaaacggcttaaatgcatcataatagttgataatgcagataagaattcaataaggtaatctctgtcagaaacagaatccatgctgttgagtgttggaccatagaaaccaagaagagaagcagtaagttctctgtctaatggataggttgttcctgcaagtgcacctgcaccaagagggcagtaattcattctttcatatatatcgtgaagtctgcttctgtcgcgcttgaacatttcgaaatatgcaccgaaatgatgagcaacagtaacaggctgtgccttctgaagatgagtaaatccaggcatgaatgtatgagtgttttctttcatgattcttaagataacagccataagctctttaagctcagcatcagtattaagaacttcttgtcttgtgaaaagtctcatatcaagagcaacctggtcatttctgcttcgtcctgtgtgaagtctctttccggcatcaccgattctctcaataagagtagcctccataaatgtatggatatcctcgtattcatcagtgatttcaagctttcctgattcaatatcagcaagaattcccttaagaccttctacaatctgctcactttcgctttcaggaataattccctgcttgccgagcatagtagcatgtgcaatacttccttcaatatcctgcttatagaacttctggtcaaatgaaattgatgcgttgaagttgttaacaagctcattagtttctttggtgaatcgtccaccccataatttcatttataaatcctccttgaattaaatatctgtattttcttcattaaaattatcttcttcatcttcaatagaagagagaagactgtcagtaagttcatcatcaatatcaggtgattcaagattctcgaaatcatccatatcatcaagaatagaactttctatattatcatcagacagtttcttaatgtctatgttagtaagagacggatcatcaagatattttctgataactaacggaaaatatgccatatttacttttcctgctttaataaagcagctggcaagataaatgccaatcaatataataatgcaaagtgtagtaataacgcaacccaatattaaattaacaggacgatattttaatacaacggtatgagttccggcacttacgtcaacacataacaatgcattttcccaggcataagtgtcagctttcttgccatcaatatacacagaccagccaccatcgtatggaatagagaataatattgctttgtctgaggaagcagtaagagttcctgtaaacttagtatcagagaatttctcaacctgatagctttctgagttaagtttattgtatgctctgatgaatttatcttcatcaagtgtgtatacagaaagattcattccgccggtatcagaagttatttcgacagtatctgtgtcgtggacataaccaatatcaagaatccggttattgctctttatattattgtaggtgtaagtggttgtgttattaatagtaacagttacggaatcaacagatttattcgcaactgacaggtacatatgaccactctttgaaggtgttataatacaatcggcttcagtagggaatgaagtagtatattcaaatacatcacttattccggtaagagattgaataagaagattctggttctcaataccattgttattcttagccataacaaggtcatatgctgttgaactgttaatcgcataaccaataggaagcgtgtaattattcttatacacaaattcaccatcgctgcctgtataataatttcttatatcactctcaactaaaaggcggttagaaatagtgtattttacagagaaaagagaatccgtaacagcggtaagaccattgcagccatatgcattagttgaattttccattcctataaggttgtaaagctttgacatccctgcattgcatgttgatgaaaatgttgaaacagttcggtaattatgccatgcaccatcatttttagaacgcgctccaaaaagcttatccattctatagaaggatgtgtcattatcagatacggtttttgtaacagtctttacggcatcataatcaagaagatatgatgtacggcttgttgttccaataccggttgcatccatattcagtgtacattcaatgattgatactgagaatgcaagcataagaacaacaggaattttgagcctggcgttgttatgaataaacattaacagaccatatataagaataaatattccacttatatatatactcttaaatgaatattcagtctcagagttaataaaaagttcttccataataagcagaagaccaattgcaatccataatgatgcaccaagctgcttgttagtagaattcttaagattaataacagcttcatagcacattgcaagcaggaagaatatatatatgaatgactgtctgcaaggcaggctgttaggaaaatgcataccatgccatatatagttaggtatatttaagttaaatgctgtcaggaagataagcaggatgacacatttgccaatcttttcacgtgcattgactttgctgcacataatataaagcggtagcagtacaaaaacagcaacgccgcagtatatgttaggcagatgatccagtcctaaatgaaccggaatgttgataagctgtcttgtgagcattgataaaatgctgaaataagaaataagcttatcagggaatgtcgtgtcgcttgaggctgaaagtgaaaatgtatagaattcaggcagaagaagacacgctcccagtccaccggcaagcagtgaatatacacagaaattaataaatttcttcacatactgcatagggcttttaataccgttataagcaatcataagaacaacatagtaaatcactactgaaaggcataccatgattgcaatataataattagtaaatatacataatcctagagttatgcaatagaatatgcagcggttctcattaacaagtcgttcaagtccaagcatgataagtggaatcagaataacacagtcaagccacataatattccagctgtatgccgcaatgaagccggacataccatagaacataccgaatatggcagcaattacatgcttgttattattgtgtttagtaagataatacgttaaagaaagactgctgccagctatcttaagtattataaatgcattcattatctctatagtgtatttctgtggaaaaagtgcaacgaaccagttagatggacttgcaaggtaatatgcgaacagagatgtgaagttagttcccattcctatattccatgagtaagtaagactttcaccatttcttatcttgtgccacagttctgaaaagaatggcgcatactgatgatacatgtcagacctcagataacattcgtttccccatgggaatatgcctcttgtatagtacagtgccatcatcattataactggaagtacaaaggcagcaagatatgtaaagttagaattaagaattgatttctttgatgaattcatggcttccctcccttagccggtaatagtaacattttaccaaagaacgaaaaaagtgtaaacaattataggcaaattaggcttgtattcgatagtacaattttgtaaaatagaaaagtacgcaaaaggaatctccaaagggtaatgcttaaggagagtgtacatggaatacagacaattatataaaaaacacaaaagggctgtacaatacggaatatgtgcagtttttctgattataaccggatcagtatatctggcaggaagaaagaatgcttcagtttcagagaatacatttgcagataatgtcgtatcaagtagtatagaagacagctggcatatggaaagtgaatcatcagttgaagacatatatgtgtatatatgtggtcatgttaattctccaggtgttgtaaagtgcctgaagggaacaaggctgtatgaagcagtggcaatggctggtggagctgatgatttggctgatatgtctgcagttaatcttgcagcacttgtcgctgatggggaaaggatatatattccggcatatggagaggatatttctgttatagaagaacagacagaggggattgttaatattaataaagctacagaaagtgagcttatgacactgccgggaattggaagttcaagggcggcagatatagtaagatacagaacagataatggcagattccagacaatagaagatataatgaaagtgtctggaattaaggaagcagcatttaataagataaagaattatatttgcgtatgataagctgcatatgcatagaaagtaaaaaggagtagattatggcaggcagagttttagttgttgatgatgagaaaatgattgttaagggacttaagttcagtcttatgcaggattatagcgttgtagactgtgcatatgatggtgaagaagctctcgagtatgctaaaaacaatgaatatgacataatacttcttgatattatgcttcccaagcttgatggattatcagtatgccagcagataagagagttttcagatgtgccaataattatgctgacagctaaaggcgatgatatggataagattcttggccttgagtatggtgcagatgattatattacaaaaccatttaacattcttgaagttaaggcaaggatgaaagctattttaagaagaaatgctgtgacagagaagaaagcagcaaagagcaatattattaatgcaggtgatatgaagatagattgtgacagccgtaatctgtatattgcaggaagacctattaatcttactgctaaggaatttgatcttcttgaattgttagcagttaatccaggaaaggtatacagcagggataaccttcttaaagctgtgtggggacaggattattcaggtgacggcagaacggttgatgtccatatgagaagacttcgtgagaagattgaagataatccgagtgaaccaaagtatgttcacactaagtggggagtaggttactattttaatgtttaataagattaaaaaaagaaatgaccataggaaaatcttttttgacagggagtttcagtcatttttcaggttcataaataaatattcaacaagacagttcgcagttatagcggtaatagttgcaacagcggtaatatgtacatttgaaggctttgagtatatttacaggcagtctgtaattacaagacagactgcggttattcagaatgaagcggttctcattgcagcagaatattctaattatgaaagtcttgaagcagctgagaataatgatatgaacagcagactcagcagttattcggcacttaatcagataagaataagaattgttaatcttaattatgttgtcagtgttgacacatattctattgacactaacaagacaattcttaatccaagagtattcgatatattcagtaatcataagaacagttccggttatgataagaaaacaggtaatatacaggcagcggttccggtatacaatgattcgggtaaatttatcgctgttcttgtggctgatcttgattacacggagatagatgcaatgtttcacgatgtgaacagtcagaataataatattaaactggttattataacaatatgtctggcgttacttatcgtaggcatatattttcttaaccggcctgtaaaaagggtacttgatattgtttcaaatgtaagtgcagggcatactgatgaaagaatccctgtcaggagttataccgaaatacgtgagattgcagatgattttaataatataatggacagagctaatgaaacagaccagtccagagcagaatttgtttcaaatgtgtcacatgaattaaagacacctataacatcgattaaagtattggctgagtctcttaatacacaggaaaatgtgccaatagaagtgtatcaggagttcatgcaggatattgtaagtgaaatagacagagaaagtaagattatagaagatttacttactcttgtcagaatggataaatctgttgcaacacttaatgttacatctgttaatatgaatgatttgttagagatgaccctcaagagagttaagccattagcacagaaaaagaatattgaactgctttttgaaagtttcagaccggttgttgcacagattgatgaagttaagatgacacaggttatatccaaccttgttgagaattctatcaaatataatgtcgaagatggatgggtacatgtttcactgaatgcagattatcaatatttttatataagagttgaagattcaggaataggaataccagaggaaagtattaataaaatatttgaaagattttaccgggtagataaggcaaggtcgcgtgaaacgggcggaacaggacttggactggctattgtaagaaacataattcttatgcatcatggaactattaaggttcatagtgaggaaaatataggaacaacatttacaatgagaatacctcttaattatgttgaaaaccagcagtaatgcagatgaaagtatgccagtggacatattcataagctgttaagaataacaggataggaaaggagcagttatgatgggacatgtaaggaaagctattatgaaattgacattcgttataattgttattgcagtaacatttgtaactgtttcatgttcttcgcagaagaagggaacagcatattctgtatattttcttaatgaagacggaacatcactaactgaaggcagggtatacatcgaaagtcaggatgctgtttcagttgcaaatgaactccttgaaaaaatgaatgttgcaaaaggcaggcatacaagcataattaagccagtgtctgtatcgcagccaacggttgaaattaatggaatatatgcaggggtctattatgacagctcttattatggaatgaaaccaggtacggaagtactttacagggcagcagttgttaaagaattgtcacagataagtgatgtcctgtatgtaagattttatgttgatggtaaggatgctgtgtatgaagatggaacagtcataggaaatatgagtgatgaggattttgtagatacacaggaaggtgctatggctgatgtgaagtggaagacgattaatctgtattttgctaacaagtcaggagatgcccttgtaaagaacagcaagagaatctgttataacaagaatgtatctgttgagaaggttgtaatggaacagcttattaaaggaacaacagagtcaggatgttaccagagtattccgtcgaataccaagctgcttagtatatctgttgtcgacaggatatgttatgttaatctcagtcaggaatttgcaacagatatggttaatgcaaagagcaatgtaactatatattcaattgttaactccctttcaggactggagggaattgatggcgttaagatacttgtcaatgggaattctaatctgatgtatagagatgtaatcagccttgatacagtatttcatatgaataatgaacttgtaaaaaaagatttatctgataattaatggtcgtttctggaaaggatattattgaagagaccattttttgtggcagcagttatgagcattgctgcagtatatttgtcattatatgccaagccatatatcgttattatagtaggaataatggtgtttaccggattccttatatatcttaagaaaacaggaattccaggattttatgtgatttttatcatgatgtttcctattatgtgtctaagaactgaagagagtatggaaaagctatgttatcagggacaattgttggacgaaacatatgctgcttgtgtaaatggatacatagcagatattaaacagtcagaaaacggttatgcggtgtatataagaaatgcctttgttatgccggattcatggggcaggcagtttaaaagcggtttggtagtatactcagagaaaagatttgccaatccgggggatgaagttaagattaaagtaacattaaaggattttaatataccatctaatgaaggacagtttaatgccagaaaatattatacatcacttggatttaattattgtgcagatttgtcagatgttgtgaatgtacaatctggaagcagttatatttccagcatttacagatttgcagattctataaaaaatatttaccaaaatgcatattctgagcagaatgctggaattatgcagtcaattgtgctaggtgacaggtcagggcttgatgatgttgttaagagaatgtatcagaagaatggaatttcccacattttggcaataagtgcacttcatgtttcgcttgttggaatgtttatatatgactggttaaaaaagagaattgggagaattgcatctgcatgttttagtacatttcttataatttcatatttgtgcatgacaggttatagtgcatctgccagccgtgctgtaataatgattcttgtatatatgctggcagacgtgcttggaagaaccagtgatatggctaatacgttagggatagcaagtgttattcttctgtggattaatccatataatcttataaattcagctttttggctgtcatttcttgctgtggcaggaattatatatattaaacccatactgtctgatgataaaactattcttatatatataagacgtcctgataaaaagaatgcagggatttttcaattaattttattcagaatcgcagattcggttattacaggcatgtgtgttacaattgcgacacttccggtaattcttattatatctgggcagattcctgtaataagcctgtttcttaatgttatagtaattccacttatgtcgttaataatgataagtggtatatttacgggaattgctggcatgctatctcttgaagcagcatatttttttgcgggagcaggtggatatattcttgatttttattataagctgtgcagtttgtcatcacattttaaatatgcagtcattgttacgggaacccctgatactgtaagggtgtttttatattttgcggttttaattatatggatatgtgtacatattatattgatgaataaaaaaattgatgctgtatgtattgctttattagtgtgtgtgctgacagggctgcattacaatattaattcagacatgaagattgccatgcttgatgttggacagggggattcaattgtcatgcatactaaggagggcatgaatgtattgtttgacggaggaagcacaagcaagaagaatgtcgggagatataccatatatacttatcttaaatattgcggggtaagaagtctcgattatgtgtttataagtcatccggataaagaccatgttaatggaatatatgaattgattgaactgtgtgataacacatttgagataggtactgttgtactgccgggaatcagtcgggctgcggcagtaaagaagcaggctgatgatgatatgtcgaagttagagaggatattgaaaaatgctgggattaatgttgtttatgctgatgcaggtgactgtattaaatcgggagaattctcggttgagtgtatgcacccatgcaagggttacaattacgagtcagctaacgactattctgctgtatatcttgtggaatatggagatttttctatgcttatgacaggagatgcagaaaagaaagcggaaaagtgtattattgaggatgtcaatagtatgacaggggatgctggtgaaccggcacggcttgtgtcagttaatatattgaaagtcggacatcatggaagtaagggggcaagttcagaagaatttttaagttatgtaaagcctgaaactgcattgatatcttgtggagcaggtaattcatatggacatcctcatacgcagactttacagagattgtcggggattggagcaaaggtgtataggacagacgaaagtggagagattgcggtgcgtgtcagggatggtttgtataaaattgaggtatttaaagctttgtaagaatagaactgtgaaggtgctgggatatgagaaaatatttttcaacttgaaccacttgtacatatctgatactattgtttaagattagaaacggaggcagcaggtttgaaggtcataagtgatgatattaaaaagggcgaatttaagagtgtatatcttctgtatggagaggaagagtatcttaagaagcagtacagagacagattaaagaatgctatagctggtgacgatacaatgaattattcatattatgattcggataatgccagcgttaaggatataattgatgtgtgtgaaacactgcctttttttgcccagaagagacttgttataatggaaaataccggctttttgaaaagttctaatgacgagcttgcagattatattaaacatattcctgattatcttgttattgttatggtagaaaaagatgtggacaagcgtaataaggtatataaggcagttgattctgtgggatatgtatgcgagatgaagccacagacaactgctactcttgaaaaatggatagcagggcttcttgctaaggataatcttaaaataagcagggaagcctgtgatttgatacttgataagacaggtgcaggcatggattatataaggcaggagacagagaagcttgtgagttattgtcagggaagggatgttgtgacagtagaagatgtagagaaagtatgcgcaacacagacaacaagtcatatatttgatatgataagtgcaattgcaaataagaaacaacagcaggcacttgatttatattatgatttgttggaattaaaagaacctcctatgagaatactttatcttatagtaaggcagtttaacggaatattacaggtgaaagatcttatgtcaagggggatttcaggtaaagagattgcatcaaagataggagcagcgccatttgttgtcggtaaatatcaggcacaggcaaaatattttgagatgaatacactactggatgcattgaatgaatgtgctaaaactgaagaagcagttaagcagggaaggcttaatgacaggctgggagtagaacttattataattaaatacagcaaataaaaaagaacccggtgcgagtgggtgtcagcaccgggttctttaaattattaaaattcctattaagccattgcgttaacagctttagtaatgtgagatacttttcttgcagcagcgttcttgtggaagattcccttagaagcagccttctcgatctcagctatagcaacagggagagcttcgttagcagcagccttgtcaccagcagcaacagcagcctctaccttcttgatataagtcttaactctagacttaaccgccttatttctctcagctcttacctgacttgtaattactctcttcttagcagatttaatgttagccaatccgtacacctccaaatcataattcaataataatatctgtttcgcattaaagccggacacggacgatctaatgtaaacatactcacacattttatagtacaaacatctatatgtcaagaactaaatgaagattttggtataaaaatttcgtttttctgcacaatatgttggggaggtgatgtgaaaaatggataatatagttgtaagaactgaccttgcagtagaagcaaatgaagaagcaatgaatggaacaggaaagctgcgggggataagattaagagaaagcaataaatcaaggatgggtgtgaaagtcacagaattgcaggtgacaaatcatttgggcgaagccgcgataggaagacccaaaggaacttatcttactatagaggcagatgatattacaggcggggacgaagaatatgcaaaagaggttgtatcgacactggcaggctatatatttaagctcttaaagcgtatgaataaaaatgtcaaaccagaaaagcttcttgtcatagggcttggaaacagaaatataacatcagattcattaggtcctgaggttgtagataacattagtattaatataagtgatggagaggagacaggagtatgcacacttagtccgggagttatggcacagacaggtattgagactgccggaattattaaaggcgttgtaagtcagataaagccggatgtatgcatagcaatagatgctcttgctgcaagaagtgtgaacagattaaatagtaccatacagctttctgaccagggaattaatcctggatcaggtgttggaaatcacagaataggaataacaaaagacaatataggtgttccggtgcttgcaattggcgtgcctactgttatagatgccgaagggattattcagggggcaggaaaaatgtatgtaaccccaaaggacattgattcagacattagaaatataagtatcataatatccaaagcaattaaccgtgttggtgttcatattcatggctgatgtgaatacaatataatggtaatgtaaagcaaggaggatgtatgagtgatagaaagtacaggcctgtgtatatgtttatattcatgggcttaatgcttatggtaataatgatgaattatagttttaatctaatatattatattcagaacagaatttatgaaaatgcagttaagacattgtttcctgtagaaacatattttgaagacaattatgatgaaaatgcaggttctgtgtgggttgattcggaatatatgtttagcatggctgaggaggataaaaaacctgctacacagacggatgagggggtcgtggaggcaggtgctgcagtctgctcctggcctttacaggaaaatgcagctggaaatgtttataatattgcagatttaaagaattatgattttcttatgaagttctatacggtcacatccatcacaagcctgacaacacagataatgcgtccagaggaatttctggcaaaagacctgtcgttggagaaaaatgcagatttaccgcagatacttatatttcacacacattcacaggagggatttgtggatacggttgaaggggatacatctacaacaatagtcggtgtcggagattatctcacagatatactcactaatacatatggttacaatgtttatcatgatacaagtgtgtatgattatgttgatggaaagcttgacagaagcaaggcttatacatatgcagaagaaaatgtggcaaaaatactggaagaaaatccgtcaattgaggttgtaattgaccttcacagggatggggttccggatactacaagacttgtaactgaagaaaatggtgtaacaatgtcaaaggtaatgttttttaatggaataagctacagcaaggcaaaaggagatataggctatctttacaatgccaacagggatgacaatctggcaatgagtcttcagatgtatcttttaggagaagcgtattatcccgggctgttacggaatatttatattaatgcatatcgttactgtctgcatatgaagggcaggtcgatgcttatagaagcaggagcacagactaatacaagcacagaggttaaaaatgcgatgataccagtggcagatatgcttgacagattactgcggggtgagaaggcgtatacacagtgacgcgaagcgcatcttgttttttacctcacattttccctataatgggcggtggagatatcctgtcgcccattccaccacacacgatagtgtaaaatggcatatgaaattaatgtatgaatggggcaaaaacctattaaagctgctaaaggtgatgaaatagtaggtaaaggaggtaaaatatgagtaacaacattttagcagatttacagccacaagctgtctttaaatattttgaacagatatgtgcaattccacatggttctggtaatgtgaagcaaataagtgattatctgtgtgaatttgcaaaagaaaggaatctgtggtttaagcaggacgaaagttataatgtaataatcaagaaacctgccagtgatagtgaaagcaaggcggcacctgttattttgcagggacatattgatatggttgccgtcaaaacgaatgataaggttaaagatatggaaaaagaaggtcttgatctttatatagatgatggctatgtcaaggctgacaggacaaccttaggtgcagatgatggaattgcagttgcgtatgcgcttgctatattagacagcaaggatatgtgtcatccgccgattgaggctgtgtttacggtagacgaggaaattggaatgcttggcgcagaggcaattaatactgactgtcttgaaagcaaaattatgcttaatatagattctgaggaggagggaatattcctttcaggatgtgcaggaggagcaactttaaaggcttcttatccattgaaaaaatcggacattacaggaacacagatgtctattaaaattaatgatcttacaagcggacattctggaacagatataatatgccagagagctaatgctaatattctgatgggacgtcttcttttttctgttaaagaatatgtgaatattgtaagcatgtcgggtggtgaaaaagataattctatagctccatttgctgatgcggttataatgacacaggaagcagataaggtcactgagcttcttaataatactgcaaatgtcttgaaagaggagtattcggttactgacccacagcttaccatcaaggtgaattgtgaaggtgaaggcagcactttggcatgtgatgatgcgacaacacagatgcttataaatgtgcttaattttatacctgatggtgttgttaagatgagtaatgatatcaaggggctggtgcagacttcacttaatctgggggttacagagctggctgagaagacattttcagcaacctacttaataaggagcagttcgcagagtgaaaaagaatatcttactgataaggttggaaaaatgactgaatatcttggtggaacttatgaacttaaaggtgtttatccagcatgggaatttaagaagaattctgcaatcagggatatgttgtgtgaatcttataatagactttttaataaagaggctttggtggaaacaatgcatgcaggtgttgaatgcggtattatggctgcaaagattgatgaccttgactgtgtatcgtttggccctgatataattgatatccatactgtaaaagaaaaattggatattgcttcgacacaaaggacgtgggagcttataactgacgttttaaaacagttggcatgaataattgaataatactatatattgtgttagtcgtatcttgtaaaatgagctgaaaaaagctttttttataccagatacgacattttttataccaaatgcgacataaactcaacagaacacgacaaaacatatagaatactatatatattgttgacagagatttgctattaatatactatattacttgtacaaaacatttattaaattccgtgcgcagggggataggaaacatttgaaaggaaaaggtatatggagtataaggaatttgtggaatatattaagatgaatgcagggtatatagctggagaaggtggtaatattactattaatcatgtgattaagaataatggctgtgagatggatgggcttgttattatggagaaggggaaagacatcgcgccaactatatatctggacagcttttatgaattgtatacgaatggtgagaatattaagaacataatacgacagatagaggttatatatgaacagaataagaataatgttacatttgatgtaaatattcttaagcattttgacactataaaggacaagattgtttataaggtcgtcaattacagaagtaatgaaaaactgctcgaacaggtgcctcataagagaatacttgaccttgctgtggtgttttactgtctgcttgataatgaatatggaagaagtgcaacagcattaatatataataacaatttgaaaaactggaatgtaactattgatgatgtgtataaagctgctttgaagaatacaccggatctgcttcacagtaagattagttcaatggccgcactttttgaaaaatgtggtgttaatgtggatggagaggaagttgatttaaaagattatgttccgtctgatatgtatgtgcttacgaatgaaagcaaactgaatggtgcagcctgcatattatatgagaatgtattgtatgattttgcacagaagctgggagcagatctgtatatactgccctcatcagtgcatgaggttatacttcttcccaaactttcgatgtttgagaaagatgaacttgttaatatggtaaaggaagttaatacagaaggggttgctgcagatgaagtcctttctgatcatgtatatgaatataacagaacagaaagattgataactatgtagggacagaataatacaataatgtacatgatgggattcgaacccacgatcttccgctccggaggcgaacgctttatccagctaagctacatgtacacaacatataataatttatatgcttatatactatacattattaaattaaaacccgcaacaattgaattaatttttttcttttgttagaattaatacatctgtatattgatttgaacttatcagcaatgaagataagaattggaggaaacatgtcagagcgtattaataaatatctcagtgcccatggagtctgttcaagacgtgaagctgacagaatgatacaggaaggacgtatcacaattgatggaagaattgcagttatgggtgagatggtagaagacactacaattatatgtgttgatggcagaaagatagacagctgcacaccaccacaggtagtcatagcttttaataaacctgtaggaattgtatgtacaacaactgataaacagggaaagaataacatagtagattttattggatataaggaacgcatatatcctgtgggcagattagataaagagtccgatggtcttatactgcttactaatgatggcgacatgatggacaggctgcttcgttccgttaatggtcatgagaaggaatacatcgtttcagtaaataaaccaattaataaagaatttataaagagaatgtcagggggaatatatcttaaggaactcgacagaactacaagaaaatgtgttgtggaaaagatatcagacaagacattcagaataattcttacacaggggcttaacagacagataagaagaatgtgtgcggaatgtggatatagtgtaactaaactgacaagaataaggattatgaatgtggaattaggggatttaaagactggtgagtacagggaacttgacggtaaagagcttaatacactttatgagcagatatataagcagatagaaacagtcaacatacaggctgataattaaggagcggattatggatttattacaggaatattcagaacttaagaagacgatagattatcatatggacagatattacaatcaggacgagccggagataagcgattatgagtatgataagcttatgataaggcttaaagagattgagaaagaacatccggaatgggtgacatctgattcaccttcacagaagattggtggcactgtaaaaagagaagccggggttaaggtcacacataatgtacctatgctgtctattgaagatgtgttttcagaagatgcagtgtgtgcatggattgatagggttcatgccatgcatcctgactgcacattttcagtagagactaagattgacggtttaagcatgagcttaagatatgtaaaagaagcagatgggaagctgcatttgcagttggcagagacaagaggagatggtcttattggtgaggatgtgacagctaatgcaagggtagtgggggatgtgttacaggttattgaccttccttatgattcactagaacttcgtggcgaagtgtatatgagccatgaagattttgaaaaatataatgaagaacaggaaaaacttgagaaaaaaacagctgctaatccaagaaatcttgcggccggaacattaaggcagcttgatacttcaattacgaagaagcgaggtcttaagatgtttatctttaatgtacaggatggacctgatgagattatggaaagccacggcaggggaatggatatattaaaggcagcaggtgtaccggttgtatatcataagatatgtaagactagggaagaggttgtcagagcaattgatgagataggaagaatgagagaagaacttccatatgacattgacggtgctgttgtaaagattgaccatatcgcattcagacaggagttccctgcaggaagcaagtattcaagcggtcatattgcatacaaatatccaccggaagaaaaggttattgttatggatgatattcttgtagatgtgggaagaacaggaaaacttacatttacagggatattccatgatccggaaaccggaaagcctgcaaggctttgtggtacaagtgtatcaagagcgactcttcataaccaggattatattacacagatgaatataggtattggtggggaatataagctttttaagagtggagagattattcctaagcttaatggatgtgtaaaggcacctgagcatgtgtttgaagcaccaaaggtatgtcctgtatgtggggaacctcttgtacgagaagatgacacagcagatataagatgtgttaatccgtcatgtgcagcacagttgtcaagaacagtggcatattttacatctcttgactgcatgaatatcatgggacttggtgaaactcttgttgatgcccttataaaagaaggatatatacacaattatgctgatatatatacattgaaagaacaccgagatgaacttattgagaagggaatcataggaaaagagaagaatactgataagctgcttgcagctattgagaagtctaaacagaatacaccagacagactgcttactgcacttggaataagaaatgtcggcaagaatacagccaagcagattatgaattattatgataatcttatggcacttgctgatgcaggtgaagaagaattgcagaatattcctgatataggcgcaactacagccaaatgtatatatgactttttccatgatgaagctaatattgaattaatagaaaggttaagacagtcagggcttaatatgcagatgccagagaaaaaagaaatatcagataagcttgcaggaaagacgattgttgtaacaggaagctttgataattacagccgtaaggatatggaagaactgattgtttctaatggaggcaaagcaacaggaagtgtcagcaaaaagactgattatcttgttgcaggagaggcagcaggctctaagcttgataaggctaattcactgggggttaaggtgcttacgattgatgaatttatggaaatgataaagtaaagaaataacagattgataatgttatatatgtctaatacaatattaatagaaaacaatttgttaaagaaagatatggaggtgattatgtatggcaacttcaagcattaccaagaattttgtggtttcaggtaagaaacaggttgaacaattcgctgatgcgattgaaatgtcatataaagaatctctttcagaatcaagtccatcttcttgcagatacagagaaatacatgaaacagatgaagtatacagagtaatggagaagtggaaaaaattatatggaggatgattttttagtattaaatatcagagaatatataaaaatgggaaaagctggagaagacatgctcaggcaggttttctccagttttaaatgtgagaaaaatcttgatgttgaaagttttcttacagaacaatctatagattttacaaagaaaaaccagtcggttacatatattgtgatttcgccagacaagaataatatagttgggtattttacaataacaattaaaccaattaccgttaatacagatgaatttagtaatacagtaagaagaaaaattgcaagggtaagtgaacagaactctgataatggaaaatattcgttgtcagcatatttgatagcacagttaggaaaaaattatgatgatagtattggaaatacaatttcgggagacaatttgctttcaattgcgcttggaaaagtaaaagaactacaatatatggctggtgggatggttgtttttctagaatctgaaaataaggatagattattagatttttatgaaaagcagaatggttttaaaaggtttgacaccaaagttacaaaaaaatataaagaaaactcacatactttggttcagttattaaaggtgatatgatataatcagacaacaatgataacagaaagaaggaacaataatgccaattaagatacagagtgatttgccagctaaagcagaattggaagaagaaaatatatttgtcatggacgaaaacagagctatttcacagaatataagacctttggagataatagttcttaatcttatgcctataaagcaggatacagaattacagcttttaagagggttatctaatacacctttacagatagatgttacatttttacagatgtcatcacatgtttcaaagaatacatcagcttcacatattaagaagttttatcagacttttgaagagattaagaacaataattatgatggaatgattattacaggtgcacctgttgagaagcttgaatttgaagaggttaattactgggatgaacttataacagtaatggagtggtctaagaagcatgttacatcaacaattcatatatgctggggtgcgcaggcaggattgtattaccattatggtattaagaaggaattacttccgaagaagctgtcaggtgtgtacaagcacagggttatgaatagaaaagagcctttagtaagaggctttgatgatgtattcatggcaccacattcaagatatacacaggcaagcagacagcagattcttgataatccaagacttaaagtacttgcagattcagatgaggcaggaatatatattgttcttggtgatggcgggaaagagatttttgttatgggacaccctgaatatgacagattaactcttgatcaggaatataagcgtgatattgacaaaggaattgagcctgaccttccggtaaattattatcctgatgacgactgcaacagaaaaccattgctctcatggagaagccacgccaacaatctctatactaactggttgaattattatgtataccagataactccttatgaccttaatgaaagttatgataattactgtatttaagggagctgtagaattattgaaataaatggtgtgtatatttttgctcgaaagaatatattgttgattagcatagttattattgaggtcggaaatggttcctgacacactcctcggagtacctgagatgatggatacaccgcccatccaataataattatgcttttttatttataagatagctgtaatgggtttatacaggagaacacaatgtcaaaagaacaagcactagaagaattattaaaaatgataaaagagggaaatattacagattacgatgcagaattagcttcataccgggatgaaaagtatggttataaaaatatagatgagaatacacagagggttaataataaagaataatcaatacataatggattcgtgctatacatcccaccctttaaaaatccccaatcccatgttataatcattaatcatcagaaaacggagataagaacatgagcgtagtaacagaaaagtcaaagtgcagaattcttaaattagcatcaatgcttgcggtaacgatgggaattataatggcattttatgcattttatattatgtcagagctatattcattttcagcaacagagcagggaaaggcattatatatggttgtcaagctgctgaatatagcatttatagcagttattgtggaaggagtttactttgcaattgctggattttatggaatgacaaacataggtgctgttgatgcagttaataaaatcaaagtttatggaattgttatgactatagcaggagttgttgatttaataatagtatttgtggtatctaagtattcaataactggtaacatgctgattcttatatgccttccggttgtaataggaattatgtatttaggtggcgcattttataatgagaagcttataaagaataataatggtgtggaaggtgatggcaatgattgatccgaatggaataatgccacttaatttcttcaaatacaagggtgtgtatacaggacagcacaatggaatgagatatatgcttaagcagacaggagaaaagcctgatttaaagctttctgcgtgcgtgtggcgcggaccatatgcttcatgtgctgttaaggaagaagataagacaacagagatatttgaactgacagaagatggtcgtcttgctgccgtggaatggataaggcagcagtacgaatccagacttgactattggaaagcggcaccgtctataaaggacgctgttccgattgttcatgaataaagagaataatatatacaatgcagcatatggcggcaccggtaagcaggagagtgtattcttctgcttcttttattataagaccaaatacaatgcggcatataattcttgatgaaaatatagatatgaccgcaatacataatggcacaattatactgccaaacgggtctggctggatgttcaacttcttgtagatattaaaaatgtaaagcagactcatgcatatgttgctaataagaacaccatacagataaccggttatgccaagctttggaataagcagaaatacacaggcaagccggatgataattccggttatattaattatgaatgtaagggcggtatgtcccatgccattagtcacgcttgtaaggctgatttttaagtagaggaaaggacacagccatgaaagaatacaggtgtatatgtatacagagtcttcgtggaacatcattgcacctaggcgcgcaccatagttaatgaataaaaatatgcttataatgccgagactcaaacacatggaaactgttctttttactgtcacagcaagatggtcagacaggacatttgaactttcatcagatacctttggaagaagcataagtgcaaatgaattagctgccgtacatggaaaaagcacaagtggaagagccattcctgtaagtataccaaactggcttattgcatcatcttttgacagtccatgcatgcacaggattgcgggaataagaattgcttctgccccttcaagcagatgcagaacagtctgattggcgttaattggaaatgcatatttaacaatatatctgtattcacggagtgaacaggagagcttctgcgtcatgcttttattatgaatggaacggaaaaacagcggaatagcacagtatgtggcagctgcaaattcaccgaatatattaccggtaactgcgtcagcaattgatattgttgatacattttttatgcgtacataaagtataatagtgccaatacgcacaagctgttcgacaagctgcgaggaggctggcagaaaagattccttctgactgtaatagtaattagacaagcagttatgtatgcacatgaatggcagagagattgcagttatacggattattccctcacagcggctttccataaatatatggtttgcaatgaaatcgctgaatataagaaataaaagcataacggcaattgaaagagaaatagtaatctttaatacgcagaaaagccatttcagagatggagatgatgctgaatattttgaaacagctacagaaaatccactgcagcatactgcaaatgcaagcgcaataagaggtatgcacatctggaatagtccgactcctgcagcacctgtataattagtgagaagtatccgaaaataaaatccgagcagttttgatagaacgccggcaattgtaagtattatggcggatttgaatatgccaccttttaaggataatttattattcatagcagataccgcagatagacttattaacaatatatgccctgcctgaatacaatattataaggaattacagggcggaaatataatgatatatatggacaatgcggcgacaactgctgtcagaaaagaagtggctgaagcaatgcttccatatcttttgggagattatggaaacccgtcaggtgtgtacaggttgtctgaaaaagctaaaaatgttgttgaggaatcaagagatattattgcagatataataaatgctgacagaaatgaaatatttttcacctctggtggaacggaaggggataactgggcagttaaagcagagagcctgaaaagaaaacagggacatataatagtaagttcaatagaacaccatgcggtgacggaatcggcactgtggcttaagaattatggaatagatgtcacatttgcaccagttgatgagcagggaattgttaagctggaacagttagaaaaaattattagaaatgatacatttttagtgtcagttatgcttgctaataatgaaattggaactatccagccgatagaaaatgtatgtgaaattgcgcatgagtatggtgcaaaggttcattctgatgcagtggcggcatttggacatattgatgttgatgtgaaaaagctgggcgttgatttcttaaatgtaagcggacataagatatgcggaccaaagggcgtaggatttctgtatgtcaggggcggaaagccagaacggttcatgcatggaggcggacaggagaacggacttagggcaggcactgaaaatgtagctgggattgcaggacttgcgacggcggcaagaattgcttatgaaacactttctgacagggcaaggcaggaaaagaaaatcagcgactatatgattaagagaatactaagagaaattccttattcaagacttaatggaagcagggaaatccgtgttacgggcaatatgaatttcagttttcagtatgttaatggcggaatgctggttgtaatgcttaacaaacagggaatatgtgcatctgcaggttcagcgtgtacatctaattcaggaaaaccttcacatgtccttcttgcgcttggacttgatgaaaaaatagcagaaggttcactaaggctgacaattaatcatacaattacacacagggaagctgattatgtggttgagtgtattaagaaagatgttgccagactgcgggaattggcttaatattaatatatcagacagttacggaggttaaaataatatgtggtacgaagaagcggtgttttatcaggtatttccacttggattttgtgatggattaagagacaatgacggggtgatgaacagatgcatatcagaatttgcagactggataccgcatttgcagaagttaggaactgatgcggtgtatttttctccaatttttgagagcgattatcatggctatgatacaagggattaccgtatgatagataaaagaataggaactaataagaattttgcagagcttgtgtcaaagctgcatgaggcaggaataaaggtagtcattgacggtgtgtttaatcatgtcggaaggggattctttgcatttaaggatgtgtgtgagaaaaaatgggattctgcctataaggactggtttaacatcagctttgatggcaattcaccatataatgacggcttctggtatgagggctgggaaggatattacaatcttgtgaaactcaatctgaataatccggatgtggttaattatcttattgagtcagtgcgcggatgggttaatgaattcgatattgatggaataagacttgacgttgcgtactgtcttaacagggattttatgaagcgtttaagatacgaaacagaccggatgaagcaggagttcttccttgtaggagaaatgtttcacggtgattacaacacaatagtcaatgatgagtgcctgcacagtgcaactaattatgagtgttataagggactgtactcaagctttaattcaatgaatatgttcgagattgcacacagcattgaaagacagtttgggaaagagccatggtgtctctatacaggaaaacatctgcttacattcgttgataaccatgatgtttcaaggattgccagcacgcttaccaataaagcacacctgccgcttatatatgcgctgatgttcggcatgccgggaattccatgcatatattatggaagtgaatggggctgcgaggcagttaagggcagcggcaatgacaatatcctgcgtccttcatttgacaagccggaatacaatgagctgacttatacaataagttcattaggacaaatgtatcataacagcagggcattaagctatggtgattataccaagaaagtactcaccaacagacaatatgtattcaaaagggaagctgatggagaaaaagtgcttgtcgcaattaatgcagatgagaatgaatatacagcttactttgatacagaatgtgcggatgcacttaatattataaccggtaagaaggaagacttatctgggaaaatagttcttccaccttacagcttcagattttacagatgtatgtagaaggtgcagataagatacatgcatataaaataagcctgagctcatcataatctgatgaactcaggctttctttcattaaatattgtgtagtaattaaatcctgcgttcttaagcatatcagccacgacatcaaatctgtaagcaaaaaatttaacttcgtgtgcatcagaacctacagtgattatctctcctccgaggtcgtgatagattttaacaatatcaaggcatggattaggttcaggcattccgtatttaagaccggcagtgttgatttcaattccttttccttgctcaatgattgttttaagaattatgcagattaaatcgttaaaatcgtgccagttatatgtgtaagaattggcaggtatatatcttgcaatataatcaagatgaccatacacatcaaagttgtgacaacagccaagattatcaagaatactttcgtaataagttaaaacagtatcctttgcagaacgtttctcccaaaactcagggtagtagggatcttctccatatacaagatgtgacgagcctattatgaaatcaagctgcttttcagaatcataagcattaactctgtcagcgacgcttctcataagtccctgttcaacacctatgtgaatattgattttatctttgtatgattctttcagattctggaaatacttaatgtattcctcaaaatcaaggtcaaacatgacttttccatcttctaaaggagcatcaaagtcattatggtcggtaaaacagatgtgcttaaatcccagtgaaatagcattgttaacaacatttacagggttctcctctgaatcagaagagaacatagtatgtatatgtgaatctgataacagcatattaatgtcctccatcaaatattagtcatatgcttaaatgtcaatatacattatacataaacataattaatccgcaattgatatttttgatgtttatgtagaacatgtaaactaatgtaaaatataggtaatttttccttgaaaatgattattagtattgatattattaaaaagacagcgtataaattctgattatgtgaatgcgcatagatgtagaagtaccaactacgctgtccgaccttgacttttatgcgcagataggagctttcgtgagttttgaattgatacacattgtgattattcttctcggaggaatagcgcttttcctttttggaatgcagcttatgggagatggattaaagaaagtggctggtggcaaactggaagttattctgtatagattaagtaatacacctcttaagggagtactgcttggtacaggtgttacggcaattatccagtcatcgtcggcaacttctgttatggttgttggttttgttaatgccggtatgattaaaatgaaacaggctatcggtattattatgggagcaattattggtacatctgttacaggatgggtgttatgtctttcagatatcagtggtggtgccggatgggtagacttactttcaacagaggttcttgctgctgttattggtgttatcggaatcatgtttaggatgttctgtaagaaccctacaaaaaagcatataggtgatattatgataggtttctgtatccttatggtaggaatgcagaacatgagtgcagcagttgcaccattaagatctgagccggcatttattgatatgcttaccaagttttctaatccatttataggaatacttataggacttttggttactgccgttttgcagagtgcatctgctacagttggtattcttcaggctttatcagttacaggagctatttcattttcagtagcactgcctattataatgggtattgctgtcggagctgccatgcctgttatcatttcttcatttggtgcgactacagatggtaagagaacagcatttgtatatcttcttgttgatgcacttggtgctttaatatgggcagtagtattttatagtattaatcattttgtgcatttttcatttatggacagaacgatgacaactgtttcgatagcatttgtgaactcattattcagagttgcaacagttgctgtactgtttccattcatcagattccttgaaaagatggtatgtgcaattttcaaggaggttgttgatgaggaagataaagatattgttgaaatcagtgtacttgatgacagatttattgctcatcctacagttgctattgaacaggctaagacagttctttgttcaatggcacatatggcacagaaaaatcttattcgttccatggaactactggatacattttcgcaggaaaaatatgacaagattcagagaagagaagataaggttgacagatatgaagataagcttggaacttatcttgtaaagattacacagcaggagcttacttctggacagaacaaggaggtctcaaagcttctccatacaatttctgattttgagagaataagtgaccatgctgttaacatatcacaggcagcagcagaactgtttaatgaaaagcttaggttttctgattgtgctgttgaagatgttgaactgatgtcattaattatgaaagaaatagttggaaatgtaatagatgcatttgaacagaacaaggtagaatatgcctataagacagagccgttagaagaactcgttgacatatattgtgatgaaatgaagatgaatcatgtcaagcgtgtccagaaaggtgaatgtacacttcatcagggctttatatttaatgatctgcttacagattttgagagaattgctgaccattgttctaacgtggcagttgcgattattgagcttgagttaaatgtgtttgatacacatgagtatcttattaatctcaagaaggataacggaactaattttgataaatattttgaggaatacaaagaaatgtttcctttaagtcagtattaagcgtggattagcgttaagtaaacaatattggatacagaatttgttaaaatttcgtcaaaatgactaattgataatgagttattattgaaaaaagtgcaaaaatgtaaaaaatgggaagaaagccttgatatttagcttcttcttatgtaaaatacatggtagttgaaattttaacaaactatgttataaaaattcattttaggaggaattgtttttatgtcagtaaaagttgcaatcaatggttttggtcgtatcggtagacttgcattcagacagatgtttggtgcagaaggatatgaggtagttgctattaacgatttaacaagccctaagatgcttgctcatcttttaaagtatgactcatcacagggaagatatgttaacttcggtgaggaagatcaggtaacagctgatgatgaggctggtacaatcacagttaaaggtaagactatcaagatttacaaagagccagatgctaataactgcccatggggagagattggtgttgatgtagttcttgagtgttcaggattctatacatctaaggctaaggcacaggctcatattaatgcaggtgctaagaaggtagttatctcagctccagctggaaacgaccttaagactatcgtttacaatgtaaaccatgagacacttacagcagatgatcagattatctcagctgcttcttgtacaacaaactgcttagctcctatggctaaggcacttaacgattgtgcaacaattgagtcaggtattatgtgtacaattcatgcttacacaggtgaccagatgatccttgacggaccacagagaaagggtgatttaagaagatctagagcaggtgcttgcaacatcgttcctaactcaacaggtgctgctaaggctattggtcttgttatcccagaacttaacggaaagcttattggagctgctcagagagttccaacacctacaggttctacaacaattcttaatgctgtagttgctaagaaggttacagttgatgaagttaatgctgctatgaaggctgctgcaacagagtcattcggttacaatacagagcagattgtatctagcgatatcgttggtatgagatttggttcattatttgatgctactcagacaatggttaatgaacttccaaacggtggctgccaggttcaggttgtttcttggtatgataatgagaactcatacacaagccagatggttagaacaattaagtacttcgctgaattaaactaatcatttagattgtttttgccggagaatggtatgactattctccggttttttataaagctgtatatgtagctattttatgtattatatggaggatattaatatgcttaataaaaagtctattgatgatatcaatgtaaagggcaaaagagtattatgcagatgcgattttaatgtacctttagatggaagcagaattacagatgaaacaagacttgtagctgctcttccaacaatcaagaagcttattgctgatggaggaaaggttattctttgttcacatcttggaaagccaaagggaccagatgctgcattttctcttgcaccagttgcaaagagactttcagagcttcttggtcaggaagttaagtttgcagcagatgatactgttgtaggcgataatgcaagagcagctgttgctgcaatgaatgatggagatgttattcttcttgaaaatacaagattcagaccagaagagactaagaacggtgaagcattttctaaggatttagcttctattgcagatgtatttgttaatgatgcatttggtacagctcacagagcgcattgttctaacgtaggtgttacacagtatgttgatacagctgttgttggataccttatgcagaaggaaattgatttccttggaaatgcagttaataatcctgtaagacctttcgttgcaattcttggaggttcaaaggtttcttctaagatttcagttatcaataatcttcttgataaggttgacacacttattatcggtggtggtatgtcttatacattccagaaagcacatggtggtaatgtaggtcagtcattagtagaggatgattatcttgattatgctaaggatatgatgaagaaggctgaagaaaagggcgttaaaatgcttattcctattgatacagttgtagctaaggaattcagcaatgattctccttcacatgttgtagaagcaggacatcaggcagatgatgacatgggtatggatattggacctaagacatgtgagctttacaaggaagctttaaaggatgccaagactgtagtatggaatggaccaatgggagtgtttgaattccctaattttgcagcaggaacaatagctgttgcagaggaacttgcacagcttaaagatgctacaacaatcatcggtggtggtgattcagcagcagctgttaacaacttaggattcggagataagatgacacacatctcaacaggtggtggagcatctcttgaattccttgaaggtaaagaacttccaggtgtagttgcagctaacgataagtaattgattttactgacatagttatataataatattttaatccagaccttatttttgttaagtggggtctggattttttgttatttatttcacaaactatacttgaaatatgtaccaaagtatgctattatttgttttactaggatagttatatcggaatatttaataggattgtccatatatatgttattatggataatttcctgtggggaggcgtagaatgagaagaaaagtaatagcaggcaattggaagatgaatatgacaccaagccaggcagttaagctcgttactgaattgagaccgaatgttaataatccggatgttgatgttgtgttctgtgtaccatccattgacattgtacctgtggtggaggcagtgaagggatctaatatacatattggtgcagagaatgtatattatcaggagaaaggagcatttaccggtgagttatcgcctgagatgcttgttgatgccggggtaagccatgttataataggacattcagaaagaagaatgtactttaatgaaagcaatacagtgcttaatctcaagatgcataaggtacttgaacatggaattatcccaattctttgttgtggagagacacttgaacagagagaaaaagggattacacttgatttcgttaaagaacagatagtagaagcatatgttggtgttactaaagagcaggtgcttcatacaatagttgcttatgagccaatctgggctattggaacaggaaaggttgcaactacagcgcaggcacaggaagtatgcggatttataagaactgtattcgaagagttatatgataaagaaacagcggatcagataaggattctttatggaggaagtgttaatgcttctaatgcagcagagctttttgcccagcctgatattgatggtggactggtaggaggtgcaagtctcaagccggattttgcggatatagttaattataataagtaaataagcatgaaaagaccttgttttgatgataatattcaagacaaggtctttgattttttttacaaatgtgctatcatgctataggcaattaattagaatacatttaaaggagaatcacattatgagtaaaaaaccagtagttttaatggtacttgatggttatggtttaaatgatagaacagagggtaatgctattgctatggctaacactcctgttatggataagcttatgaaggaatgcccgttccagaagggatatgcttcaggacttgctgtaggtcttccagacggacagatgggtaattcagaagttggtcatatgaatattggtgctggtagaattatttatcaggatcttacaagaattactaaggatattgaagatggtacattctttaagaacgaagaattacttgaggcaatggagaactgcaagaagaatgattcggatcttcaccttttcggacttttatcagatggtggtgttcacagtcatttaagccatgtatatggacttttagagatggcaaagcagcagggagtgtctaaagtatatgttcatgcgttcctcgacggaagagatacacctccagcttcagctaagggatttgttgagacacttgagaataagatggcagaaataggagttggtaaggtcgcatctttatcaggccgttactatgcaatggacagagataataactgggacagagtagaaaaggcttatgattcacttgtaacaggtgatggcattaaggccgagtcagctacacaggcacttcaggagtcatatgataatggtaagacagatgaattcgttgagccaacagttatctgtaaagatggtcagccactttcattagttaaggctaatgattctgttatattctttaacttccgtccagaccgtgcaagagagatgacaagagcgttctgcgatgataagtttacaggatttgaaagaaagacaggatttattccattaacatttgtatgcttcaaggattatgatgaatcaatccctaacaagaaggttgcattcaagaaagagcatattaagaacacatttggtgaattccttgctaatcatggaaagaagcagttaagacttgctgagacagagaaatatgcacatgttacattcttctttaatggcggtgttgaagaccctaatgttgatgagttcagattactcgttaactcacctaaggatgttgcaacatatgacttaaagccagagatgagtgctccggaagtaggtatggacttagttgaggctataaagtctgacaaatatgatgttattattatcaacttcgctaatcctgatatggttggacatacaggcgttattccagctgcaatcaaggctgtagagaaggttgatgagcttgttggaaaggctgtagatgcagtaaaggatgttgacggagttctcttcatctgcgcagaccacggaaatgctgagaagatgattgattacgaaacaggagctccacatacagcacatacaactaatcctgttccattcattcttgttaattatgatgagaattatacacttcgtgagggtggaagattatgtgatatcgctcctacacttatagaaattatgggactcgagaaaccggttgagatgacaggcgagtctcttcttgtgaagaagaattaatcaaagggttgaaattaatttgttgatttttcttgcacaaaatgtttatttgtgatagaatgacctatgttgccgtattggcataattatgtaataaaaagcgcatgatgcgcaggaatgaggatggtatgaataagataattccattgtttcatatgtctgtcggagatgtattaagaattggtttaatgggagtatttgtagtaatttgtatagctttagcaataataattcttatgcaggaaagtaagcagaacggattgtcaggaacaattagtggtgctgctgattcatactggggtaagaacaagggccgttcaatggaaggcaagcttgttaagataaccaagattcttgtaattctttttgttgttatagcagttatacttaattttaatttctaaattacgaacactcttaagaaacggataatttcttaagagtgtttttgcttttacgagcaatctggtagaatctgtatatttaatggttagaaagggatataagggatatggagaaggatatatttaaacagcgaagacagatgcttgctgatatgattcttaataatgaactgtatgttccaatgaaagctaaagaaatcgctatgcttctcgatattcctaaagctaagcgttctgagcttatagaagtgcttgacagtcttgttgcagatggaacaataggtgtatcaaagaagggtaagtatatgaagcctgaaaatgtagcacttgttggaacatttgaaagcacaagcagaggatttggctttgtagtaatacctgacagggaagatgatatatttgtcaaggctaatgacacgatgaatgctttctatcatgataaggtcaaggttgtgataactacagagaagaatggcggtaagagggctgaaggtaagattgttgctattgttgagcatgaggttaaggaagttgtaggaacattccagaagaacagaacgtatggttttgttattcctgataatgcaaagattaactgtgatatatttataccgcaggaattcatgaatggagcggttgaaggttctaaggtagttgcttctataagtgattacggcagccagagtaagaatccacaggggaaggtcacagaagtacttggacatatagatgacccgggtgtggacataatgtctattatcaaggcatatgatttaccagtggagtttcctgaatcagttaagaaggcaattaatgatattcctgatgttgtcagtgaaaaggataaggctggacgagttgatttaagaaatattcagatggttactatagatggtgaggatgcgaaggatttagatgatgcagtatctatctcgaaagaaggacctgtatatcatctaggtgtccacattgcggatgtaagccattatgttacagagggaagcgcgctggataaagaggcacttaaacgaggtacgagtgtttaccttgtagaccgtgttattccaatgataccgcataagttatctaatgggatatgttcacttaatcagggagaagacagactggcactcagctgccttatggatattgacgaaaagggaaatattgttggacatagaatatgtgaaactgttattaatgtagacagaagaatgagctatacaagcgtaaaaaagattcttgtagataatgatactaatgaaattatgaagtataaagagcttgttccaatgtttcatatgatggaagaggctgcggagcttcttagaaagaagagatttgcaagaggttcggttgattttgatttccctgaaagtaagattatacttgatgagaatggtcacccgactgatattaagccatatgacagaaatgtagcaactaagattattgaggattttatgcttgctgctaatgaaactgttgcagaggattatttctggcaggatatgccatttctatatagaactcatgagaatcctgatccggaaaaaatgcgtaagttagccacatttattaataactttggttatacattaagacttactgatgatttaagacctaaggagattcagaagcttctttctgagatagagggttctgatgctgagaatcttataagcagactgacactccgctctatgaagaaagctaagtatactactgaatgtgtaggacattttggactcgctgccaagtattactgtcatttcacatcgcctatcagaagatatcctgatctccagattcacagaattatcaaggagaatcttcacggaggtttaagtcctaagagagctgaccattatgatgcaatattaccggatgttgctgtccagacaagtgcgatggagcggcgtgcggcagatgctgaaagagatacagacaagcttaaaatggctgagtatatggaacagtttgttggagaaacatttgatggagttgtttcgggtgttaccgcgtggggcgtatatgttgaacttccaaacactatcgagggcatggtttctatcaataatatgaagggattctatacatttgacgaggaacactatgagatggtaggagaacttgggaacagaagttataagctcggacagaaggttaaggttgtggttataggcaccgataagatactaagaacaattgattttgcatttgcatagaatagaatggagactgacatggcatcaaaaacaagcgcatcaggaaacagacttatagcgaacaataagaaagcttattttgattattttatagaagagaaatacgaggcaggtatggtacttcacggcactgaggttaaatcaatcagagcaggtaagtgctcaattaaggaatcttatatcaagattgagaatggcgaagtgtatgtattaggtatgaatattacaccatatgagaagggaaacatattcaataaagatcctttaagacctaagaagctgcttcttcacaagaatcagattaataagcttactggtgaacttacaattaaaggttacacacttgttcctcttcaggtatatctgaaagagggaaaggtgaagatggaaattggtcttggaaaaggtaagaagaactttgacaagagagattctattgcaaagaaagaccagataagagatgcacagaaggaattcaagaacaagaatcttagattttagaaatattttatcagttttgaatcacaagttcattgacttggcattatgccaatgttaatatatttaagcaggtaaaactgcttacacacgggctagtaaaggtttcgacggggatcttgaagctggtgaagctatccgcaggaaagcgtcaaaatccaaacttaaatataaacgctaacgataatttagcatacgctgcctaattgcagcagtctgacttaaagcacctacactttaagacccaggcttcgaacatgtaggaaacgacagtatcaaagctttgagatgctggtcgtatcatgaagctactaaaggtgcaagggtgttgattcccgtgtaccggagggaatgttaaacaatcaactatgatagtagaagaacagggaatgggttttcggacaggggttcgactcccctctggtccataggaaaaagggagtgaggaagcgtgagcttcttcgctccctttttcctatggaccagaggggagtcttattaatggataaaacatggcgtagccgggtttttggacaggggcgcacgaggtccggttgacctcggctttgcgccgaccggagcggagcgaagaattcgactcccttttgtgggggaggtggatacacggtgaattggacgttaaagcggaggaaagtcacaagaaagtccaaaacaccaagttcacttgccacacaatactcaatagcgtaaaataagtacaatcacataagtaaggaggagccagctatgaacagagctgttgtttattattcattatcaggaaatacaaaggaagctgcaaaggttattgcaagaaagttgggagcaaaaatctttgagatagatttagttaagccattacctaagaatacagtaagacagatgcttgtcggaggaatgcagtcaacatttggaaggagacctaagataaaaggtgttcctgataacatagattattatgatgaaattatattaggtatgccagtatgggcaggaatgcctgcgtctccggtcaacacatttataaagaattacggagtggcagataaaattgatgctgtgtttacattcagcggtggcggagataacgacagatgtctactgcagctgtcaaagagtcttaagaatctaaaaaatcaggttgcgttagcagaccgcaataataatgcttcaaaggataatgaagagaagcttgaaaagtttgttatgagtatcaagtagaaattgtacaatgatatagcaggtttatgatattagtcaggggtagaatatgaggtttaaaaatgtgttttgtacacaattatataaagatacattttctaaagttttaaaagaagatgagtttacacacggagatgagattctggttgatatggaagaaccagatggagacaggatatcttatattataatgcaccatggacattccatatctgattgcaaggcatttgtcacgacaactgatgaaaatgttctgattgctgtgtttgacttgtggggaaagttttataaatgttatatcataaagaatgatagtataaaaaatgttgaagttgaaaatgttcttggtggtaaggagataaaatttgatggtgaatcacaatatggaaaaatatctgtaaaaatgtctgtggtcaacagacagtttggcacagatttaaagtttcaacgggaacatctgcagttatttgctgcgaatctgcaaagaatttctgaaaatcctaagtgctttatacaagataaagatcaggtaaacagcaacaataatattgatagtgatgaaataagcatagatttaagtctggttgaattgacagatactcagagaagacaactgataggtaacagaaaatttgaggatttcaatcttgaaagccataatataaatattatttatggagtctatgaagctaacagagatattgtattgacccttacaagctttacatctacaatattgacccaagatggcggcgactataattattgtattttgtacaaagaaaaagagtatggcgttacatatggttttaactgggatgataaaaaattaaatggaatacataacagaacaccattttgtcagaatgtagttgaaagcatggtcagatattatgaagattcatttcacgaaagatcggagctggaagaaaatgttagaaaaagatttgagaaagaatataatatggagatacatgatttccttaaattttatatagaaaatgttatggataactcataagaactacatttattttgttatgaagcataaaggaagtaaaagaatttgtgctataataagcatactaaatatttacatagactggaggatacaagcatggacgaaaatgtaaataaaagaaacgaagtactggcacagactgtaattaatggcttacagtcaagaaacatgtcaggatattatgcagaggataaagaagcagctttaaagcaggctctggagttaattgacgaggaaagcacaattgctatgggcggctgtcacagcgcgcaggagattggacttgtggaggctttgaaggagggtaattacaattatatagaccgttcaaagatgaccccaagagaaggacttctggcttcatatgatgcagatgtgtttttatcaagtgcaaatgcaatgacaagtgatggaatacttgtaaatattgatggcaattctaaccgtgtttcatgcatagcgcagggaccaaagaaggtaatcttcatagttggaatgaataaagtctgttcagacctcgattcggcaatgaagcgtgcaagaaatatagctgcaccgactaatgcacagaattttgatgtcaagacaccctgcaagacaaccggaaaatgctttgactgcaaatcaccagacacattatgctgtcagttcctgattacaagatattcacgccatgtcggaagaatacatgtaatacttgtaaatgatacacttggttattaaaaggagaaactatgattaacagacttcatatggcaatgattgaattatataagggagacgctaagagaatacagcatttttgcaaggttcgcagctacgcaaagctgatagcacagatggaaaatgttgatgaccaatgtctttttataattgaaacagcggcacttacgcatgatatcggaattcatacatgtgaggaaaaatatggtgagtgcggaggaaaaatgcaggaaaaagaaggtcctgctattgctgcaggacttcttgacaggcttggctttgacagcaaagtttcagatagagtgcagtatctgataggacatcatcatacatacaacaatattgacggtattgactaccagatacttgttgaagcagatttcttagttaacatatgcgatgataatcttacaaaggaagctgctttaaaggtatataataacatttttaaaactgagagtggcaaaaagatatgccgtgaaatgtttggactggagaagtgaaacttatgagcgataataaaaatgttaataataaggaaaaaggctttgttgtcggcggatatacttttaagacgaagcaggaagcgcaggaagcaaaagatgagatgaatgctattaagtatctgtctggaaagacggacagtaaagatccgaaacaggtgtatgtgttgtataataagataattgacagacagttattttatacatccattgggcttaattatctcaagaatttacagcagtttctgtataattcaccagatattccagatgataagattaagccgattccggtaaagagtgaaacacagattgcgattgacagaagacgtgaaagaaatgagcatagaagtgagctgcatactctctcaatccaggtggcaaagtacaagaacaattatatgagaattatgattgtaaatgtgtttcttgttattgcgttaattgcaatgttttttatccttaagacaggttctaattctaatgtcattaattatgaagtgaatgtacagaataagtattcttcatggcagacagagcttgaatctaaggaagccaagttaaaggaaaaagagaaagaacttaattcaagggaagcggagcttgaatcaaagcagtctttaaaatcatcatcacagcagtcaacaaagtagtcataatataaatatatgaacagagtacacattttaaacatatttatcagatagtatatagataattaattcatcgtgaaagtgaggactacatatggataagatgaagattttagtagtagatgatgaaagcagaatgagaaagcttgtaagtgattttctgacaagaaaaggctatgctgttatagaggcggctgatggtgtagaagctgtagatacatttatggagaacaaagatattgcacttataattcttgatgttatgatgccaagaatggatggctgggaagtgtgcaggcagataagaaaggattctaaagttcctattataatgcttacagcaaagggtgaggagatggatgaactacaaggttttgaatgtggagctgacgaatatatagccaagccattttcacctaagatacttacagccagagttgatgcaattataagacgagcatatggtgttgacagcaacgagataattgagattggcggaattactatagataaagcggcacatatcgttaagattgatggtgaagagatagagttaagctataaggagtttgaactgcttacttattttgttgagaataaagggcttgcgttgtcaagagagaagattcttaacaatgtatggaattatgattactatggtgatgcaagaactatagatacccatgttaagaaattaagaaagaagatgggggagaagggcgattacatcaagacaatctggggtatgggctacaagttcattgttgactgattctgcgaataaggaaggcaattaaagatgaagatacattcaatcaagtttaagattacacttcttctggtagttactgttacatgtcttgtggcaatgcttattgggtttaacagcattttttcagagaaagtgtatatgaaccgtaagcagaagagcatgattaattcttatgagaatgtcaatgaaatcatgcagaaatatactgattcacagatagataaagatactatgtgtgctgatatggagaacatatctacagcaaagggaatatctgtgcttgtagttgacagcagctggtgtaccatatatgtaagtactcagggagatgattcaatgatggaacgtcttcgcatgagtatatttaatggagatatttttaagaataatggttcacaggataaagcaccggaacctaaggatcaggaagatgattcagataacccggcagacaaggatgataagaaggagcatagaaagcgtctggaagatattattgatatgtcaggtacatcacttgttgagaacaggacaatcataagttcaaatgataattacacgttacagaaggtgtatgacgaaagacttggcgactattatcttgaaatatggggtacacttgacaatggatattcaattatattaagaactcctatccagggaataaaagataatgtaaatatatcgacaactcttattaagtatgttggaggagcaattcttgctgttggtataattgcagcatttgtagtatcaacatatattaccagaccgattaagcagctttctaatattgctgagaagatgtcagagatggatttcaatgcaagatatgagggaagtgataagggagagattggtctgcttggaaagagcatgaacaatatgtctgagaagcttgaacagaatatagcagagcttaagaaggctaaccttgaacttaagaaagatattgataaaaaagaaaagctcgagataatgagaacagattttctttcaaatgtatctcatgagttaaagactcctattgcacttatacaaggatatgcagagggtcttaaggaaggcataacagatgatcctgaaagcatggaattttactgtgatgttattatggacgaggcaaacaagatgaatacaatggttaagagacttcttacacttaatcagatagaattcggaaatgatgagcctgagatggagagatttgatattaatgagcttattgcttctgtagcagatgccaatgcaataagagcgggacaaaagaatatgagtatagtatttgataaccgtaatgagcataattttgtgtgggctgatgaatacaagacagaggaagtgcttactaattatatatctaatgcacttaatcactgtgatggaaagcgtgcaattgaggtgagaactgaaaaatcagagaatggaggaactattaccgttactgtatataatagtggaaagaatattgctgatgaagatcttgaaagaatatgggagaagttctacaagactgataaagcgagaacaagagaatatggaggtaatggaataggactgtctattgtaaaggctattatggattcaatggggcaggaatatggtgtcagaaatgtatctgatggtgtagaattctggtttaatcttgattgtaaatcataatatgatataattgttatcagtgtatgagaataatttgtatattcatcatgaacgatgataataattataaagggaaattgaggaaatatatatgaaaaaagttataacaggtctgcttgtgcttttgtgtatatctgcactcacaggttgtggcaaagatgatgtaacattaaccaatgaagataatgatctggttgctgagtatatagcaggaacgcttcttaagtattcatatgataatgaatggaaatatcagaagcttaattcagcacagaatggtggaggtacaataagttcgtctggtatacagaaaccgtcacagacacagtctgcaattacaggacataataatacaatacagactactaaggcgtcaggtaattcagcgaacacatcagcagatttattaacagggctgccaactgcacttggatttaatggtgtgacacttacatataaggattatactgtgggaaatcagtatccggcagataattatgtggtttcagtgccggcacagacaggctgtaaggttgttgctgttgagatgacacttactaatacaagtggttcaacagttaatcttacatcatcaggtggtgttgtattaaagctcacagccggctcaacagctgtaagcaattatgcttcaatgcttaagaatgatattacaacacttaagaatgtttcactggcggcaggagagagtaaagaagtagttgtattatttcaggtaaaagaaagcgatgccaattcattagccggtttggttatgtcggcaacatcatcaggaacatcgcttggttcattaacaatcaattaagaatgcataacattttcaatgttgtaaaaggcagcttgtgcttcatctaactgatgaacataggctgctcttttttcaggcttatatccatcgccatgtccattatattcagcataatatacagtttcatgtgattcaggcttattccagtcagtgaagccctcatcaataatctggtcggaatattcacagttaagaagaacaaccttagcatgaattctccaaggtctgcttaaagcaacgcttttaggcggacagtttcctgtaaatgtgcaattattaaatacataaccgaaagcctgaccttcatatgttgaaggtgcagtataatatgagttgatgggttcattccggtttaatgcaaaaagtgtgcagtttttaaaataagctgtggcacttccgaaaataaaatcaatttcaccacatataaagcagtcttcatataactggtgaacgagctttctttcaccgtctattgttggacctgtaaaaccacctggttgtttttctttaagaggcagcggaccggtaaataaagtgtcctgatgaccgagaattttacagtgcttaaatgtgatgttgtcaccttcagcgtatacagctattgcctgaccgacattatcaccaaatccggcgctgttttcgaatgttatattgcttgcagagaaattattggcatatacaagaaatgtatatgaacggaaagttccgcgcttagagccgtcaggcataatcattcttgcatagaaaccctcagtaataatagtttcatctgtatcttcaccaattaaggtaatattatttttccggatttcaatacgttctttatatattccttttttgataaatatagtttcgttgttattatcagaaacagaatcaactgctttctgtatggaatcaaagtcaccagaattgtctttagctaccgtaatcataaaaatacatacctcctattttttgctattatagcacactggacattaataaataaagcgagtataattccattcgttaaaaaaattgtaggaaatagagattatgataagaatagtagaagatatgagagatgttaatatatatctttcattaagaaaacaagtcggctggattaagttagatgaaaatcaggctcagagagcattggataacagcgtgaaagtatttacagtatatgatgatgacaagcctataggaatgggaagagtggttggagatatggctgtaataagctatatacaggatttaataataataccggaatatcagagtaagcacataggaagcatgcttatagaacatataatagcttatgtcaaaggaattactcaggaaggcacaagaatgatgctttgtctgatgtgtgccaagggcagagagatattctatgaaaagcatggatttatcgcaagaccgacaccagaactgggaccgggaatgatacagtatatattacaatagcattgtaaaatgtaatgttaactgaatgtcaacctgaattaataacaggttgacaatagctttttaagtgtgtacaataacaaatgttgtattactacatttgaaaagaggactttaactatgaaaagcaaaaaagttactatttatcagctgacattcatggctatgatggcagcagttacatgtattcttggaccactttcagttccaattggtcagattccaatatctcttactaatcttgtgatttatttcacggtatttgtactgggtatatgggcaggaacaggaagctatggaatatatctgctgcttggtgctgtaggacttcctgtattttcaggatttgccggtggattaggaaaacttcttggaccaacaggaggatatcttataggtttcatattcatggcacttattggaggagctgtgattgaactttcacacagaaatatttttcttacaatgttaggctgggtagttggaactgctgttgcatatgcatttggtacggtatggtttgtataccttatgaaatgttcagtcacatatgcacttacagtatgtgtatatccatttatcggatttgatattgttaagatagttattgcaacacttcttggaaagacagtaagatatgcaataactaaagctggtcttatacagaaagcagcataataagtaaaagaaaaaggtgtctccggattaatggagacacctttttgagtacaatgcagaattaattatctgagagtcttaacatactcagcaatcttctcatccttgcagttagcaaagaaaagctcttcaaacttctcacctgcaacagcacccttaacgagatcctgatcaagctccttaagaacttctacgagatcctgcttaagagtaacagctcttacgccatcaagaatcttcttgtttctctgttcaggaacaactctttctttaggatatccgccacctggttcaccctcgaaaagcttttcaaagatgtatgtgaggttaagttctgcaccccatccgaagccctttgcaaatggaagagcgatagcgttaccatcgttaatctgcatgaacatataagcgtctgaaggatcaacaacatgtccacagagaactccagggaaagagttaagtgctaacatagcaccttcaccagtaccacagcctgttactacaaagtcagcggcaccgctgtttaaaagaatagcagcaaggataccgttctgtacgtatgtaagctgtgctttatcatcagctgagtacataccataattatcaactgtatgtcccttgctttctgcaaccttcttaagtgatgcataaatcatctcgttctttgcagcctggctgttttcattaattaatgcgattctcattatgaaatctcctcttttcttatattctatataaactataagctgtgggtctgcttttgtcaaatgtgtatactgaaataatacatttaccaaatgcgtacttatgtgttatattatacagaacgaattaagttgaaagaggttagataatatggctgaaaataaagattcccaggcagcatttatggaggctgtcggaagcattaaagaatatgccaaggttaatggcaatattgttacaagagaggatgtacacagcttttttaaagatatggcattagatgatgccaagttccagatgatttcaggatatctgatggctaatggaattaagatacagggtgaagatagcgtagataatgaattcctgaaactgatggaaagtgcctcagatgataatattgatgagtcaggacaacatatttctaaggaagaacaggaagataagaaggttgcggatgatattgtaagtcatcttgattatgaagaggatgagaagtatctgaaaatatatcttcaggatatatcaggaatacagcctatgacagatgttacaagatcatatcttcttatgaacatagttgaggataatgataaagaatcactaaaactgcttacagaaagttatcttgaaaagattgcgtcatggatagaaccattcagaggaaagggagttcttgcatgtgaccttgtacaggaggccaatctggctatgacagcatatataggacagcaggaatggcttaataattatgagtggaaggataagattaaagaaggtggacaggaagaccttcttaatgtgcttaaaggaattgacgaagcagttaaggagcttattgaaggcagtcttaatatgcttatagatgaacagacggatgttaatatggtttcgggaaaaattctcaataaagtcaatcttgtaaatgactggggaacaagacttaaagaagaattaggaagaaaacctacggtggaagaagtagcaaagaacatgggagttgcagaaaatgtggtacttgaggctatcaggctttcaagtgaaacaattgaagatatcaagtacgaaaagacggttcctaaagaataactgattaataaaattaatatatacacgatttcgagaaaaatttaacaattttttattgattttaattagggcatggtatagaattaaaaagaattttgtaataatttacaagaaattataagaaaagaggtttatgtaagatggcaaaaatcgatttaagcaagtatggcatcacaggtgctacagagatcgtctacaatccttcttatgaattattattcgaggaagagactaagtctactaacgaaggttatgaagttggtaaggaaagcgaacttggagctgttgatgttatgacaggtatctatacaggtcgttctcctaaagacaagtacattgttgttgatgagaactctaaggacactgtatggtggacatcagatgagtataagaacgataaccacccaatgtcagaagatgtatgggctaaggttaaggacatcgctaaggcagagctttctaataagaaacttttcgtagttgatgcattttgtggagctaacaaggacacaagaatggcagttcgtttcatcgttgaagttgcttggcaggcacattttgtaactaatatgttcattaagccaacagcagaagaacttgagaacttcgagccagatttcgttgtatataatgcttctaaggctaaggttgagaactatgctgaattaggccttaactcagagacatgtgttgcattcaacattacaagccatgagcaggtaatcattaatacatggtatggtggagagatgaagaagggtatgttctctatgatgaactactaccttccattaaagggtattgcttcaatgcactgctcagctaacacagataagaatggagagaatacagcaatcttctttggtctttcaggaacaggtaagacaacactttcaacagatcctaagagactccttatcggtgatgatgagcatggttgggatgacaatggcgtattcaacttcgaaggtggatgctacgctaaggttatcaaccttgataaggaatcagagccagatatctacaatgcaattaagagaaacgctcttcttgagaacgttacacttgatgagaatggaaagattgatttcgcagataagagcgtaacagagaatactcgtgtatcttacccaatcaatcatattgagaatatagtaagaccaatttcttcagctccagcagctaagaatgtaatcttcctttcagcagatgctttcggagtacttcctccagtatctattcttacaccagagcagacacagtactacttcctttcaggatttactgctaagcttgctggtacagagagaggaatcacagagcctacacctacattctcagcttgcttcggacaggcattccttgagcttcatcctacaaagtatgcagcagagcttgttaagaagatggaaaagagtggagctaaggcttacttagttaacacaggatggaatggaacaggtaagagaatctctattaaggatactcgtggtatcattgatgctatcctttcaggtgctattaatacagctccaactaagaagattcctatgttcaactttgaagttcctacagagcttccaggagtagatccagcaatccttgatccaagagatacatatgctgatgcttctgagtgggagactaaggctaaggatcttgctgcaagattcaataagaactttgttaagtacacaggtaacgaagctggtaaggctttagttgctgctggtccacagctttaattttcaatcattactgagtttgaactttgattatatacctgcgtctgaattgtattctttcgcaggtatatttgaatttttttgacatataatattgtgtaatcagtaaagaagatgtataatcaatacatcggtacagattgtgtatcaattgaatatttcctgggacgttcgcaaaaccacattattttgatcctacatttcatcgacgggattcctatatctccattccaatgtcaagcctccttagtcagtggaaggcagcggtttggatgcggttgcccacctagcttcgctaggagtcgaaagcgtggggagcggcgttttgggatattattaacaggctgtcatgtatgtgacagcctgttttttgcgcgaaaagcgatgagaatataaaattataaaagcggacatgtttgcatgcgtcgctttttatgattttatattcgaggagcaacgcgacaatgccagaacttagttctggcatataagctttttgcgcgaaaagtgatgagcatacctagttctaaaacgcacattttcaacatatactatcaagagcttgtctgaacagggacacttaatttagtatggagaatagtatatgaaacagagaacaaaaataatattcttagtctattctgcactggtgatttttatgtcatcagtatgtatatatatgtcacatatgattaaatcaagatatcaggacacatcgtcagaaatcaatatttataaaaatgtatatataactaatatagaagacaacacgataactgccaatatgtatggtaatataaagaaattcaatagtggaaagatagcagaagatgtaaccgggtgtttatgtgatattaccgttgagaatggaaagattgttggagttaataccaagacggatgttgtaagtggaaaggtgctgtcagtttcacaagacagcgttgaaattgaaggttatggttctgttaagctggatgaggactttattatgtatgaaaaagaaaactcattgataagtaattacagcagtataattgtcggttatgcattacaggattttattgtggcggatggagaagtctgtggtgctattaagaataaacctttgcaggctgataatataagagtaattatcaagacaagcggattcagagatatattttttaatgaagcagttttttgtgctgattcaggaatgatagttgagactggtgaagaatcttatgagacggcacccggggagacggttgtgtttaatcctgatacagaagactttaatgagggcagaataaaactaattcctaaatcaggtgagatacagttccagtcagtaaacagaggcataggaacaccttcatatggcggaactattgaagtttcactgtatgatgagggaattgttgttgtaaatgaagtggggatagaagattatcttaaaaaagttgttcctagcgagatgccgtcagggtttaatcttgaagcactgaaatgtcaggctgtatgtgcaagaagctatgcttatacggaactttctaataactattatagtgcttatggagcacatattgatgactcaatacagtttcaggtatataataactcacagcgggcagaatcaacagatactgcagtagatgagacagcgggacaggtgctatcatataacggagaagttgttaagacatattactattcaacctcatgtggaagcacaacagacgttacactttggggcaatacaacagaaaactatccgtattttgttgcggagtgtgtgggtggagtggacagaggacttacactgacagtagaatcggagttcaatacatttataaaaggtgaaaatgaggctgattatgattacgactgcaccttgtacagatggagcatggaggaatctgttaaagagataagtgaaggatttgcacgttctacagggaataatgtaggaaacataacggatattgaagtacttgagcgtgttaatggaggagcggcagtaaaagttaaagttacaggtgataaaggtgagacagtgatagacagtgaatcagcgatcagggcagcatttggcaatgcaaatgtggatatgaacactaagtcaggaacgacaaaatatgctaatcttccaagtacattctgtgtgtttgagaaggtgacggagggaaagaagcttacaggctttaagataacaggaggtggctacggacatggaatcggcatgagtcagaatgctgccaataaaatggcagaatccatgacttacgcgcagattctggaattcttctacagaggtactacgcttactctgatttcttcccaagataatgcctgaatattttttcatcattgatgaagtagttaatctctgcaccgatgaatattataatcatacaggcatacatccatataagtgctatgataatagtagcaagactaccgtacatgtatgaaaagttcggtgagtggccaacataaagagaatatagagctgtaaaaagataccatcccaaagcagaaaagaaagctccaggaatctctttatagaacttttttcctcttcttgatacaagtgagaatgctatagtaaagaagagtgtgaatatacttggaaagagaaaatgtttactgttaaatattcctctgaatatcacgactacattagtaagctgtggtatatatttcatagtgaagttcataatattgttaccaaataccataagtataaggctggcaataataagaatcataaatataagggcatagatacttgctcttattctctggaaaagccagttcttctggttaccttttctgtatatctgttttaatccacggactatagccatgaatcctttaccggcagcccatatgatagcaattgcagtaatgagtgttaatgccgttgttgaattgtcatatatatcagtgagcattacctgaacaataggctgcagttgagttggaagaacaccgtatatgatttttaaaaggtctgccttggaaaccggcagaaactttataaggcttaaaagaccaataaaaaacgggaaaaaactcagcatgagatagtaacatgctgaggatgcgtagtcaccgatgcggtcttcagatatttttgtaataattcttttgattaataatattaaattgagcattcttattccttaatccttaactgaatgttttcaagatattatatgttattttatagaatttagcaattacttgcaaacagcagttattttatgtaaaatgtgatacgtgtaattatgcacagtaaatatagtgaggcagatatgggaataagtgttaagcttcaggtgtttgaaggacctttagatcttcttttacatttgatagataagaataaagttaatatatatgatattccgattgcaatgattacggaacagtatatggaatatgttgagcagctaaagaaggaagatcttaatgtagtaagtgagttccttgtaatggcggcaactcttcttgatattaagtcgagaatgttacttcctaaggaagtggatgaggaaggcaatgaggaagatccaagagcagagcttgttgaaaagctgttagagtacaagctgtataaggctatggcacaggaattaaaggacaagcatacagatgcagagagaacctattataagaagcagaatattccagaggcggttgctgcatatacaccgccggttgatcttacagaggttattggcgatacaacacttatgcgtcttaacagaatatttgctgatgtttgtaaacgtaaggaagataagatagatcctgtacgaagcaagtttggaaagattgagaaagaagaagttaccatgagtgaaaagcttgtggatattaaagcatttatgatggagcatgaagagtttagtttcagggagcttttgtggaataatccatcaaaggttgctgttatagtaacatttttagttgtgttagaacttattaagaccggattcgttgaggttaagcaggaatgcccggaggatgatatattcataagggtggtcagggatcctgagcttattgaagatataacagaggagtagaatgatgagtttagaacagatggaaggcataattgaggctgtgctttttactatgggtgattctgtggaagcaggtaagcttgctgatgccatagaacaggatgtggatacaactgttaagatagtacacaatcttatggataaatatgaatcagagaacaggggaataagaattattgaacttgagaacagcttccagctgtgtaccaagcaggaatattatgatgcacttataagagtgtgcagccagccaagaagatatacactgacagatgcggcattagagacattgtcgataatagcatataagcagcctgtaactaagattgagatagagaatatcagaggtgttaattcagacagagcagtaagcaagcttgttgagctcggtcttgtaaaggaagttggaagacttgatgcaccgggaagaccaatgctttttggaacaacagaggatttcttaaggtcatttggagtacagtcgatagatgagcttccaacaatcagtgaagacatggttgaacaatataaggaagaggcagagttagagcttgcaagcgaaagctttgatgcagataatcaggaagattctgatggtcagataacattaggaatatagaaaggaagttgacattatggaaagaaagaatgcatggaagaaatattcagacgaagataagaacaatgtattcacatttgcagatggatataagacttttatatctgagtgtaagacagaaagagaatgtgtaaaaaaggctgtagaactggcaaagaaagccggatacagagatttacagaagataatagcagccaatgaaacacttaaagcaggcgataaggtatatgccgttaatatgaagaaggcaatagtgctttttaatattggaagtgaaccgataagcactggtatgaatatacttggggcacatattgattcaccaagacttgatatcaagcagaatccaatgtatgaagattcagacctggtacttcttgatacacattattatggaggaatcaagaaataccagtgggtagcaattcctcttgcacttcatggtgttgttgcattaaagaatggtgaatgtgttgaagtagtaatcggagaagatgctgatgatgcggttgtcggagtatcagaccttcttatacatctggctgccaaacagatggaaaagaaaggaaactcggtagttgagggtgaggacctagatatccttataggaagcatgccggcagcatcagacagtgataatacagatgagaataaggaagaaaaggaagcagttaagaagaatattcttgcaattcttaaagaaaaatatgggattgaagaggaggatttcttatcagcagagcttgaggctgttccggcaggacctgcaagagattatggtctggacagaagcatgattatgggatatggacatgatgacagagtatgtgcttatccgtcgcttattgcacttcttaatacaccacaggttacaagaactggcgtgtgcatacttgtagataaagaggagattggaagtgtcggtgcaacaggtatgcattcaagattctttgaaaatatggtcgcagaggttatggacagatgcggtgattattcagagcttaagttaagaagagcacttgctaattcttatatgttatcatcagatgtaagtgcagcatatgaccctaattatgcatcagtatttgaaaagaagaattcagcattctttggaaaaggtatggtgtttaacaagtatactggttcaagaggaaagagtggttctaatgatgcttctgctgaattcattggaaagttaagaaaagttatggatgatgcagatgtgtatttccagatggcagagcttggaaaggtagatgcaggcggtggcggaacaatcgcatatatcttggctaatcttgatatgaatgtaatcgacagtggaattgctgtacagaatatgcatgcaccatacgaggtaataagcaaggctgacctatatgagacattaaagggatatgaagcatttttacagatgtaaaatgtttgtgttaacgaaaggacaataatatgaagtggaataaatattcaatccagacaactacagatgcagttgatatgataagcagcgcgcttaatgatataggaattgaaggtatcgaaattgaggataatgtacagcttactaaggaagaggctaagtcaatgtttgtagatttcattcctgaccttccacctgatgatggcagagctaaggttaatttctacattgacagtgaagaagatgatggctcaatgcttgaaaaggttaaggcagaacttgaagatttaagaatgtttattgatattggtgagggtacaatcacagaatcagagacagaggataaggactggattaataactggaagcagtactggcatacatttacaataggagacttattcattaagcctacatgggagccggagacagaggagatgaaggggcatgctgtacttagcattgacccgggaacagctttcggaacaggttcacatgagactacaagaatggttataaagcagcttcagaagtatgttaaagatggtgatgaggtgttagatgtcggctgtggaagcggtatactttcagtagttgcattaaaatatggtgcaaagcatgcatttggtacagacctcgaccctaatgcaattattgcatcagaggaaaatgcagagcagaacaatatagataagaagcagcttgaggttattgagggtaatatcattgatgacaaggctgttaaagatgcctgtggctatgagtgctacgacattgtgtgtgccaatatccttgcagacgtattagagccactttcaacatgcatacatgagcatatgaagcacggcgcttactttattacttctggtattatagatactaaggaaaaagaggtagcagaggcatttaagaagaatcctgagttagagatagttgagattaaccatgatggcgagtgggttaatatcacagcaagaaggaagtagtgtatgtatcatttttttgcagagcatgagaatatccatgattcatatatagatatagttggaagtgatgttaatcacattaagaatgtattaagattcaaagaaggcgaaaagcttcttataagcagcggagataatgttgattatgaatgcagtattgcttctatgtcagatgaatatataagggcagatatactaagcaaggacgagcagggaaaagaactgccttcaagaataattctgtttcagggactgcctaaggctgataaaatggagcttataatacagaaggctgtagaacttggagcatacagtgttgttcctgtagcaatgaaaagaagcgttgtaaaactggatgcgaagaaagctaaagctaaggttgaacgttggaatggtattgcattaagtgcagccaagcaaagcaagagaagtatccagcctgaagtgacagaagttatgacatttaagcaggcacttgagtatgcgggaaagctagataagcttttactgccatatgagtgcgcagaaggcatggaaaagaccagaaaagtgattgaagaaatcggacatggagaatctgttggtatattcataggccctgagggcggattcgacaggtcagagcttgacgaagctgtaaatgcaggctgtgagataatcacactaggtaagagaatattaagaactgagacagcgggaatgatgctgttgtcagtgcttatgtataatatggaagaataagcggaaaagaggcaatatggaagcatatcttgataattctgctacaacgaagtgtgcagcagaggtagtagaaacagcagtaaaggttatgtcagaagattatggtaatccatcatcaaagcatatgaagggcgttgatgcagagaaatatatccgtgaagctaaagaggtaatagcaaagactcttaagtgtcaggataaggagatactctttacttctggtggaacagaatctaataacatggcaataatcggaacagcaatggctaataaaagaaaaggaatgcactgcatagtatcatctgtagaacattcatcagttaaagagccattcaatttccttgaaaaagaaggcttcagaataacatatcttccagttgataaagatggaatagttgatatagaggctctaaaggatgcacttgatgatgagacaatacttgtttcagtaatgtatgttaataatgaaattggtgcagttgaaccgattgaagaaatcggacatataattaaagattataatcctgatattgtatatcatgttgatgcgattcaggcttatggcaaatataagatatatcctaagaagcttggaattgatctgttatcagtcagtggacataagattcacggacctaaggggagtggattcttattcattaatgataagacaagaatcaagcctattatatatggtggaggacagcagaagggcatgcgttcaggaactgaaaatgttccggctatagcaggacttgcaactgccgtaaagcttatatataataatgactttgaaagcaagatagcacatttgtatgagttaaaggattacttcatagatgagcttgaaaagcttcctgatgtacaggtgaacagcaagaagggtacggattcggcaccacagattgtaagtgcaagctttaagggagtaagggcagaagtgcttcttcattcacttgaagataaaggaatctatgtatcatcaggttcagcatgctcatctaacaagccgggactgagcaatacacttgttgcaatcggacttgataaggaactgcttgattctacacttcggttcagcttctgctatgagacaacaaaggaagaacttgaatacacaatagaaacacttaaacagctgcttccaatgcttaggaagtacacaagacgataattgtgtgaaaatagattttcacacacaagatttgtgctttgcacaaatcttgatatgcaaaggaaaggcggaaaacgatgtataaagcatttttgataaagtatggagaaataggcgttaaaggaaagaacagattcatctttgaggatgcccttgtaagacagattaagttctcacttaaagatgttgagggagaatttgatgtaagaagagcagatggaagaatctatgttaatgcactttcggactatgattatgatgaggtaattgagagccttacaagagtatttggtatagttggaatctgtcctgtagttcagattgaagataacggttttgatgaccttgctaatcaggttatcaattatcttgataaggcatataagaataagaatcttacattcaaggttaatgcaagaagaacaagaaagaattatccaatgaactcaatggagattaatatggagcttggtggaagaattcttgatgcattcccagagatgaaggttgacgtgcataagccagaggttcttttacaggttgagataagaggagatgtaatcaatatttactctatcgaggttccgggtcctggcggaatgccaatcggaacagcaggaaaggctatgcttttattatcaggcggtattgacagccctgttgcaggatatatggttgccaaaagaggtgtacagattgaagcaacatacttccatgctcctccatatacaagtgaaagagcaaagcagaaagtaattgaccttgcaaagattgtatctaagtattcaggtcctattacacttaatgttgttaatttcacagatatccagatggctatatatgagaaatgtccacatgatgagcttacaatcattatgagaagatatatgatgaagattgctgaagatttaggaaaatcaagcggatgtcagggacttgttacaggagagagtatcggacaggttgcaagccagacaatggcaagtctttactgtactaacgaagtgtgtacaatgcctgtattcagaccggttatcggttttgacaagcaggagattattgatatatcagaaaagattggctcatatgagacatcaatacagccatttgaggactgctgtacaatattcgttgcaaagcaccctgtaaccaagcctaatcttaatgttatcaagcagcatgagactaaccttgacggagttattgaggagctttacaagacagcaattgagacaacagaaaaaatcgtaattgaataaaataaaaccgctttatctgcaacagataaagcggtttatatgttcttacacatcattactcaacgatgtatggctttaatacggcaaggattgtatcaatatcattgtctgcatgaatgttcaggtcaattggcttagaaagatcaagactgaatatacccattatagacttggcatcaattacatatctgccagaaacaagatcaaagtcaacatcgaatttagtgatatcgttgacaaaagattttactttgtcgattgaatttaatgaaatctttacagttttcattagaatacctccttaaatgtttttctataaactataatatctatttgttaaacctatgtcaataaagaaatgtaacaaaaattaacaggaaatgaggattaaattgaaaaaagttgctatacacagtctgggctgtaaggttaattcctatgaggcagaatcaatggagataatgcttagggatgaggggtatcagatagtgcctttcagtgaagatgttcaggctgatatatatataattaatacatgttcagtaactaatattgctgacagaaaatcaagacagatgctgcataaggcaaagaagatgaatccggaggcggttgttgttgctgctggctgttatgtgcaggcagaccctgacggagttaaaaaggatgaatgtgttgatatcattcttggcaataatatgaagataagtattgttgaagcattaaatgattattttggaggttcggataaaacaagctatcttgttgatattaatgacaagtatcaggagtatgaatcgcttaagattaaccagacaggggaacacacaagagcgtatatcaagattcaggacggatgcaaccagttctgttcttactgcataataccatatgtaagaggcagggtaagaagccgtaagcctgaagatatagtaaatgaggttaaaacgcttgcagctacaggtgttaaggaggttgttcttacaggaattcatatatcatcttatggaacagaccttgagaatataagtcttatagaacttatagaggcaatccatgagattgaaggaattaaaagaatacgtttaggttcgcttgaaccaagaataattacagaagaatttgcaaaaaggattgccggcttagaaaagatatgtccacattttcacttatcattacagagtggatgcgacaagacattaaaggcaatgaacagaaaatataatacagaagagtattatgagggctgcgtaaagttaagggaagtgtttgataatccggcaataactactgatgtaatcgtgggatttccgggcgagacagaggaagatttccttgagacacgcaagttccttgagaaagtacatttttacgaaatgcatatattcaaatattcaagaagaaagggaactgttgctgataagatgaaggagcaggtagcagacactgttaagtcagaaagaagtgcagttctgcttgcgttagagaaggcacagtcacttgaatacagaaagatgtatatcggaaaaaagctcgaagttcttatagaagaattgacagaaatagatggcaggtcatattatacaggatatacaaagaactatataagagtggcaatagccgctgatgagtttaaggataatcctgttaatgacatatatgaatgtatggctgataagcttatctgtgacggggttactatattagcgaggtataattaatgtcaagaaagaatactaaaggaacaatattagctatagatatgggcaatactaatatagttattggctgtgttgatgatgataaagtaatatttgaggaaaggctgagtacagatctttcaaagacagagctggagtatgctatcagctttaagaatgttcttgaaatctataatataaaatcagaggatatcaatggcgcaattatatcgtcagttgttccacagcttgttaatgttattaaagctgccgttgaaaaggttgtagatatagagcctctggttgtaggacccggagtaaagacggggcttaacattcttatggaccagccaaagcaggtgggaagtgacttaatagttgatgcagttgcagcgacacatgattatggcgcacctgttattatagttgatataggcacagcaactactataagcacagttgatgagaatggcaattatataggtggtgcaatccttccgggagcaggcgtttcaatgaattcactttcatcaagaacggcgcagcttccaagaatcagctttgatgcacctaaaggaccggttggaaagaacacggttgactgtatgaagagtggccttatatacggacatgcaggaagtatagatggaattattgacagaataatagattgctgcggattcggaaagaacggaaagcctgctgcaaagcttgtggcaacaggggggcttagtaaggttataattccattctgcagaaatagaattgagactgaccctgcacttcttataagaggtctgaaatacatttatgataaaaatgtctagaatagtggacgcataagcgggaggagataatatgcttaagggaaagacagttgttcttggagtaacaggcagtatagcagcatataagattgctaatcttgctagtatgcttgtaaagaagcatgccaatgtgcatgttataatgactgagaatgcatgcaattttattaatccgataacatttgagacacttacaggaaacaagtgtttagttgatacatttgacagaaacttccagtttaatgttgagcatatcagccttgcaaagctggctgatatattccttgtagcacctgcttcggcagatgtaataggaaagattgcaaatgggatagcagacgatatgctgactacaacaattatggcatgcaaatgtcctaagcttatatcacctgcgatgaacactaatatgttcactaatcctatagtacaggataatcttaagaaattagagcattatggatatgaaattatccagcctgacagcggatatcttgcgtgtggagatacaggtgcgggaaagatgccatcggagcaggttcttcttaattacatcttaaggacaatagctaaagataaagatatgactggaattaagcttacagttactgcaggacctacaagagagaagttagaccctgtaagattcttgtctaataattccactggaaaaatgggatatgcaattgctaagatggcaatgcttcgtggagcggatgtaacacttatatcaggaaaagtaagtcttgaaccggtgccatttgttaagatggtggatattgtttcagcagaggatatgtataatgcagtaattaagagtgctaaagacgcagatatcataataaaggctgcagcagttgcagattacagaccgtctgaagtaagtgatgaaaagattaagaaaaaagatggtgatatgtcaattcctcttgagcggactaaagatataatcggcacacttggaagcagtaaaagagatggattgttcctgtgcggattctcaatggaaacagagcatatgcttgacaattccaaggtgaagcttacaaagaagaatcttgatatgatagtggctaataatgtcaaggtggcaggagccggatttggaacagataccaatgtggttactgttattactaaagacgcagttgaggagcttcctatgatgagtaaggaagaggttgcagatgcacttcttgacagaataatgaaagcaagacaataataaaaaaataaaaacaggctgccggttaactggcagcctgttttgctacatatcttcgccaagtgccttgattcttccgtaagtacttaaaagatataagcctgaaagacctacaagtgcgtatattatacggtcaaccataactgatctgaatataaaatgcacaagattaaagttgaggaaaccgataagtccccagttaagcgttcctacaatggcaattgtaagagcaatgtagtctataggtttagaattcataaaatgcctccttaaaatagcggatttggttttgaaattagtatggaaaatgtaagataaatcatactggtaaaatatggattttgttgagaaaaagtgtaaacttgacgactttaaaccttgtatcatactgtctaaaatgctacaattacagtgtttgtgaatcagcacagataaagtgcggaaataatgaggtttatcatggcgggaaagaaagtagtcagatacagaagaaagccgaaagcagcagcaattatatttggaatagtgctggtatatattgtgtgctttatagttatatatgtttcaaaagcaaaggtacagacatatgaagttgaagtgggatcattaatgaataatgcttcatttacagcggttgccttaagacaggaagaagtctataattcttcatattctggtgatattaactattatcagcgagagggaacaagagttatgaccggtgatacagtgtatacggttgatgagacaggaagggtttcagatatacttgcacagtatacatcaggtgatggcaatgcactttcagatgataatcttacggttattaagaatacacttactaattacaagactgagtatgcagacagcggattcagtgcagtttatgacctcaagtcagatcttaatgcaaccgtactacagtctattaatgagaatattatggccaatcttgattcaattgtagcaagcacaggaagtcaggacctttttaagactgcaaagtcagataaaccgggtatagttgtttattcggttgatggttatgaaggagttaccgaggaaacaattggcagtgttgactttaagaaaaaatcatatgataagcagagtcttaagtcagaaaagcttattacagcctcagatcctgcatataagcttattacaagtgagaactggacacttatgtttccaattacacagtcagatatagataagtattctctttcatctaaggatacattatcaattaagtttaccaaggataatattacaggcacatttccattcaagatagttaatgatggtaagaactcctatggtgagataacattatcaaaatatatgataagatatgctacagagagattccttgatattgagataattgtgtcaggaaagtcaggaatcaaggttccggtatcggcggtaaccgagaacgaattctataagatacctaaagaatacctcataactaatggcgaaaagggtgattatggattccttgtagaacagagcgattcagatggtaagctgaatcaggtatttaaggctgttgatatatataagtcaaatgatgaggctgtgtatattaagaagacagaactggcagccggcactggaataatcaggatggattcaagtgacaggttcgttgtaggaccggttgaaaagcttagaggtgtgtattgtgttaatacaggatatacagtatttaagcttgtagaagtaatagatggcaataatgaatactacatattaaaacagtcgcttagtcatggtgtgtcaatatatgacagaataattctggatgcagacaagtattcagagaatgagatgatatattaaatgtttatgcatatcagattaatgacattcaggaggcattatgttaaaggataatcttattgaagtagaagagcatattaagaaagcatgtgagaaatcaggaagaaatccagaagatgtgtgtcttgttgcagtaagcaagaccaagcccaaggatatgcttatggaagtatatgactgtggaataagacagtttggagagaattatgttcaggagatggtggacaaggcagatacacttcctaaggatataacatggcatatgataggacatctgcagagaaacaaggtaaaatatgttgtaggacgagctgcattgattcattcagttgattcagaaagacttgccgttgcaataagtgatgaagcagtaaagaaaggccttatacaggatattcttattgaagttaatgttgcaggagaagagaacaagttcggtgtaacatgtgaagaagcggaagaatttgtgaagaaaataggagtgcttccgggaattaagataagaggatttatgacaagtgcaccatttgttgaaaatcctgaagataacaggaagtattttagagaattaaagcaattactggttgacatcaataacaaaaacatagataatgtatacatgaatgttttgtccatggggatgactaacgattatactgttgctgtagaagaaggggcaactcatgtaagggttggaacagcgatatttggagccagggactattcacattaatatgttttggggatactaaagaaagtcagattattagatataggagagtgtttataatgggaatgttagacggtttaactaatatgtttaagatgcatgacgatgatgattttgatgacgattacgaagattacgatgatgattttggtgatgactacgatgatgagaaaccatcagaaagaaagaatctttttggaaggaataccaagaaagatacagtagcagacgaagatgtttcatatacagcagagaagccaagatttgcttccaagtctaaggttgttcctatgaagacacagtctccaagaggacttgaagttgttgtaataagaccagaatctatggaagatgctaaggagataactgatacacttcttacaggtaaggcagttgtgcttaaccttgaaggaatccatgttgagatagcacagagaataatagattattctgctggttctacatatgcaataaggggtaaccttcagaagataactaattatattttcctggtgactccacctaatgtagatatttcgggtgatattcctgagatagtaacaggaggaattgatctttcatcatttaacaagaatgaaaacagattttaattgatcttcacagccacccacatataatgggtggctgtttaagtataaggataagggagaatgttatgaagtgtattaatgtaaagtgcgaaggtaaaccagcatacgatattgtgattgaaagtggattcggtggactttcagaagcctttaataagcttgaaataacagggagaaagttatgtattgtgacagacagcaatgtaggtcctttatatgcggaacaggtaaagaatgagcttgaaaaaacaggcaatgcggtatttgtgtatacatttgcagcaggagaagagaataagactcttgacacagtacaggatgtatatgaatatcttatagagaatcattttgacaggaatgactgccttgtagcacttggcggaggagttgttggcgaccttaccggattttctgcggcaacatatcttagaggaattaaattcatacaggttcctacatcacttcttgcacaggttgactcaagtattggcggcaagacaggcgttgatttcagggcatataagaatatggttggagcattccatcagccaaagcttgtatatatgaatatgtcagtgcttaagtcactcagtaagagactttttaattctggatttggtgagattattaagcatggtcttattaaagacaaggaatattacaactggcttaaggacaatgcagaaagcataaaggcgctggatacagatgcacttgagcatatgatatatgtgagttgtaacatcaagagagaggttgttgagaatgatcctaaggaaaagggagaaagagcactgcttaatttcggacatacattaggacatgctatagagaaagagatgaatttctcgctttatcatggggaatgtgttgtccttggaatgatagctgcactcaatatatgtgtcgagcttggaactataactgcaaaggaaagagatgatgctcttaaaacatttgcattatatgaattccctgaccatgtcacaggaattaagattgatgatgttgttgcggtatccaagaatgacaagaagatggatgccggcaaggttaagttcattcttcttaagtcagtcggagatgcttatattgacagagatataactgatgaccagatgagaagagcacttgaaggtgttataagataaatgtttaataacggaggctgaaagtgaataataaaaagaaaatattcaatttgttattttatattataggaattgttgttctgactgaattagaccagattaccaaagcacttgcagaagcgaggcttttgggaaaaccggattttaagataataggcgatgcttttgttttttcttatcttagaaattcaggtgcagcatggggcatgttaagcggtaagattaatctgtttcttgtgtttacagttatagttatgcttatagtaacttatgtaattattaatcttcctgcaacaagaaagtatacgccacttcttataacatgtacattacttgtatctggtgcagtaggaaactttattgacagggtaagattcggatatgtaagggattttatatatttcaagcttattaattttccggtattcaatgtggcagactgctatgttactgtttcagttgtgctgcttataattcttattctttttgtctataaagaagacgatttcggattcttaaagttatcgaagaagggtgataataatgagtgattcagtgcagaatttaattgctgaaccagaggataagggaacaagaatagataaatatctgtcgcaggagttagaagatgtgtcaaggtcacgcatacagaagctgttagatgatggagatattacggttgatgacaaatgtgtcaagtctaactataagcttaatggaacggaacatatcacaataacaattcctgaacttattgtgccacagatacttccggaaaacatacctctgaatataatatatgaagatgatgatgtgatactgatagataaaccgaagggaatggttgtacatccggctgcaggacattatacaggaacagttgtcaatgcacttatgtatcattgcagggataatctgtcaggaattaatggcgttatgcgtcctggaatagtacacagaatagatatgaataccacgggtgttattgttgcatgtaagaatgacaaggcacataatgatattgctgcacagcttgctgtccattcaataacaagaaagtattattgcattgtccataaccgctttaaagaggaagaaggcacagtggatgcacctatagggcgtaatccaaaggaccgcaagatgatggcgattgacagaaagaatgggaaacgtgctgtcacacattaccgtgtacttgagaattttgacaaatacagttttatagagtgtcagttagagacaggcagaactcatcagataagagtacatatggcaagtatagggcatccgatacttggagatgatgtgtatagtcatgccaggagtggatataaactgcagggacagacactacatgcaggtgttcttggatttatacacccgtcaacaggtgaatatatggagttcaaagcaccattgcccgaatattttgagaagctgcttaaggatttaagaaatggaggtagcaattgagacgcagggaatttatagatatgatattgaacagtatttcagatacatttgatatataccataattactggtttgaaggtagaaagtttgttatatatgcttacagctataataagaaagacaggttttctacaacagatgatgccaagttatgggactcaaaatgctatgagcatctgtttttcattaattgtgatacgcttggcatgaaagagcttgatgatttatatgattttgctgtcaataagattgaaccgcattttgtacgaggtgacggaaagctgcctgctaagaatcatatgtatacacacatatcatttataataattacaagaaatcaggtgcttcctgatgtcgagaaagcacttcaatctaagaattttagcaagaattatatgtttggtgcaagaggcttttctaatatcagactggcttgcgttacaccgagcagatacagtgtgatatctaataaggctggaactaagatagcagaatttcttacagagatactcttgcatatagaccattatgaagagtaattaataattattaaagattaatttaattatgcttaatatgtagattttaccacagaaataatgtataatatatctaaagtatttcgtatacaattgaaaccaggaggtaggaactatggatgagagaacagttattactatcggacgagaatttggaagcggtggacatgagataggcatgaaactggcagagaagctggggataaagtgctacgacaaggaactgcttgaacttgcagctaaggagagtggactttgtgaagaacttttcgcatctcaggacgagaagcctactaacagtttcctttattctcttgtaatggatacatattcactgggatatactaattcatatgtggatatgcctattaatcacaaggttttccttgcacagtttgatgctatcaagaaacttgcagagagagaatcatgtgttattgtaggaagatgtgctgattatgcattggaagataatccatatgcagtaagtgtatttatcaaggcaagtcttgatgagagagtacagagaattaagagaatctatgaacttaatgattctaaggcagcagatcttatccagaagacggataagagaagagcaagctattacaattactactcaagcaagaaatggggagaagctaagagctacaatctctgtatagacagcggacttgtaggagtagatggcgcaattgatatgatacttaagtttattgaattaaaagagaagaacatgggcaaagatatttaattcacttttaatatatacacggttggtaagttatggattttaatggctataagagaacgaagaagtttgatattaagagatggtttaagggaactaattcaatcgtataccttgttatacttgttgtaatggttctgggactgctatttgtgttaagaactgttatcagtatgcataacagcaataagaattctgataatgtatcacaggaagagactactggtgaaactgattcatcagagaaggatacacagacacagacaattgcaaagaaccagtcgtattatatcagaataagcatagtgaagcatacgttggttgtttatcagcttgatgataataaagaattctctattcctgttaaggcttttaaagtggctctaggacctaaagttgctcctgccaagacggctatatcagagaaatctctatggcgtaagattacagatatatattatgtcagatactcttcaagacttgataatgctgagtatcttagtacggcaacttattacagtcagagtgataataatcttaatccaaagtcatacaatgctattggacagaatgtatcagacggttctattcttatgacatgtgccaatgccaagtggatatatgagaattgtggtgcgaagacaactgttgagatagttgaggattttgatataagttctgatattaaggttgaagatataaacagaatagctgataatgcatatagagacccgacagataatgtgaatggcagcagtaatatacagaataataatgtttcacaatacaatcagacacaggctgaaacagaagctgtcacgaatgatgacagacctcaggagactgaggcacagacacagaagaatgatcctcgagagacacagacgacaactgtcagtcagcaggagactactgcccagtcatcagaggcacagaagccgtatgacaagaccgtgtcagagtaatttaacaacacatttataataacaattaatcccttttcgctttttataaagccgaatgtatgctataataggtacattcgtgtatttatgaaaggaaaagggattattttatgtcaaacattattattttagcagcaattatactttacctgggaatggtagtgtggataggtgtaatctgttctaagaagaacagtgatgtaggagacttctatcttggtggaagaaagttaggacctgttgttactgcaatgagtgcagaagcgtcagacatgagcagttacctgcttatgggtgttccgggactggcataccttacaggtcttgctgacgcaacatggacagcaattggtcttgcacttggtacttaccttaactggcttattgttgccaagaagataagattatattcacatggttatcaggcaataacacttcctgattatttctctaagagattcggggatgacaagcatgtaattacattaatatctgcagcacttattgtaatattctttataccatatacagcatcaggctttgctgcctgcggaaagctgtttaacagccttttaggctttaattatcatacagcaatgattgtcagtgctgttgttatcgtactttactgtactatgggaggattccttgcagcaagcacatctgaccttgtgcagagtattatcatgacatttgcacttgctgtagtagttatatttggaattgtacaggcaggaggaatgggggttgtacttgataatgccaaggcgcttccaggatatcttgatatgttccatacacatattgcagagactaatacatcaggtgattatggattctttaagattgtttcaacacttgcatggggactcggatacttcggtatgccacatatccttttaagattcatggctattgaagatgagaataagttaaagatttcaagaagaattgctactgtatgggtatttatatcacttattgttgcaacaggtatcggtgtaatcggtcttacactttctaaatctggtattattgatactttaacaggaagcgaatcagagacaattattgttaagatatcacattatctttcaacatttaaccctgtagcagcatttatagcaggaattatccttgcaggtattcttgcagctaccatgtcaacagcagattcacagcttcttgcagcttcatctgctatatcacagaaccttgcggttgaggtgttacatattaatatgtctaagaagacatcaatgcttgttgcaagacttacagttgttgttatatcagttatatcaatattctttgcacttgatcctacaagctcagtatttaagattgtttcatttgcatgggcaggtttcggcgcagcattcggtcctgtagttctatgctcacttttctggaagagagccaataagtatggaattatatcgggcatgattgctggcggtgcaatgatatttatatggaaattcggtattgcaaagcttggaggaatatttgctgtatatgaactgttgccagcatttatcttcgcaacattagttattattgttgtaagtcttgcaacaggaaagccatctaaggaagttatggacaagtttgaagaagttaagaatatgagcaaataactatagagaaggtgctttatatatgggatatacaatcgcgatatgtgatgatgataagactatggcagacaaactgacggcttcattgaagaatgagttcatgaaagcaggcaggaatgatgtaatcatagattactatgacacaggcgtgcagttactggaagctctaaagaataaaatgtataaagcagtactcctggacattaacatggagccgatggatggatttgctgtggctgaggctattggaaaatcaggatacaggactaagattatattcgttacttcgcatgaagatgttgtatatgatacatttgattatactccgttctattttatcagaaagtcaagatatgagacttatgtacagagagtcgttaagaagctaatcgccattgatggttatgaaaagacgattgttcttgatgataaagatggaattatcaatattaattcaggtgatataacctatgttcacagtgaggaccattatcttacagtacatacggctgatgggaattcctatgtaatcaggaagaatatgatggaattcggacaggatatagcaggtacggatataataagggctcataaaaaatatatgattaattacaggtatatttcaagaatcaaccagagtactaatgaggttattatgaaagctggagaaactcttaaacttggaagaagttataaagatacatttatgaagggatatatgcagtacaggcacaacagacagacatatgaatgatatattgttaaatattgttaatatcagaatggcaataatgatatgtataggagtaatacttgtaagagagatatatctggtactgaacggctatatcgctaaagcagcgtatgtagtatcgacactggttgtcattgttatagcggctattacttatggcgtgatatatattgcagatgcacaatctttaatacacaggacaggaatatatgagtttactgtcattattatatatctggcattgattgcatttatgaatacatttaagacaatcagacatggcagttttacgaagatagatataattaatatagcagcatatgttttggtattatgttttaatatatatctgttaatcagattaggaatttctgatggcggccatgatgtcatgctgattatgaacattatagtgttaagtctggtgcttgcaattatattctacagaacgcttgtaaggctctatcaggagaattacaagggacaagaggctgaacatttaagaaatgtaatagagtcaggtgaggattatcttaaaaatgttcaggcaatggataagcaggtaagaaccgtaaggcatgatatgaataatcagcttcaggttatatatggtctgctttcacaggaaagatatgaggaagctaaggattttcttaagcagtacagtataagtcttgagaaaaccaagggatatattcatacagataatccgatattcaatactgttattaataataaaattgaatatgccaagagtgaagatatcataataacgacaggtcttcataagacattaaagcctatgcatggcaatgacctgtacacgattatgggaaatgtgctggacaatgcaatagaggctgaacttaaagaagatatatgtaacagggaaatagaaatccgttccgtgtggaatggtaatgatatgattataactgtagagaattatatatcaaagtcagtattaaatgataataaagagcttcatacaagtaagcaggacaagaaatcacatggtcttggaactcagattattaagaagcttgtaaagaagaataatggaacatgtgattatcatgaagaaggtaatatgttctgttgtgaaataagatggtgatagagccggaacagttggattaatctttctgttccggctttttgcaactatacttatagtcaccatggtcgttcacgacaaagttgctgtcgttcacgacattggtgttgaaatgatagattacagggattatgcttaatgtatgaagagcagagacataagcaatatactaatgattaggaggtttttatggttattaagaaattattaaaaacaggagcatgcttcgccgcaatggcgctgattgttggaatgtatatttcaccatcaatagcaagggcatcatatgacaaaggatatggatatggatttgattatgatggtcaaacaaagtatacaaatgaagagaaaaaggaaacatattcatcagtaggaatggagtgtacagattcagaggatgaatatgcctattatgtagcaagggtttttggtgttgatggtgatgatgactttgattattctcacgggtatgagtataccttttatgaaggtacttcatacgagatgttaaactgggttaaagagaataattgtccgaaagttaaagtcagaggaattggttacaggatagacagtgaatatggaacagtatttactggttactggagtccggatttatattaattaattatattgcttatgtcagaacaggagtaattatgaagagtaataagatcacaattatttccagcttattcttaatgactgcgttgtgcggatgcacaacgcagtctgttgataaagcgaaggaaatagaagaaagtaatacatatgtgtataaatatgaatatgagacaaatactgagggacaggcagagacgcagtatcatgaagaaaagccatcatttgatgattttgaaacagtaactaagggaactatagcatcattgagaaataaaaatggaagtcttaaattaattaaaatgaacgaagtatatgaatggggaggaatggagtgttccattgcagaagcacacatgactacgaatgtggattatgcagatgaaatattagacgataatgtattagatccatgtaaggagaaattaaagcgtatatatccgacaggaaaaagcagagtagataagaatgaaaaaattgtatgggttagagtacatattaagaatacaggtacaaaagataaagatttaaatatgacaacagatggagcaaaagaaatatcagagggtgattataaaccaagtgttacaagtttgttaatagataaagaattgtgctttcagggagaaactaatcacagagatatagtaagaataaaggcagactgtgagcaggatttatggtatgcattaagtatattttattatgatgaacaaaccaagtactatatgtatggttcatttggatatatatttgatccaagtgattattcagggattttaatagaattgaatgacattaaggatgaaggctgatttataaagggaggaagattaagatgcatgatttaaggattttattacggattgagtttaagagagcatttaaaagtaaagcattttatatatgtctcgcaattggtatagcattagctgctggttcttttattaataaagccgtaccgcatatggatgtattaaaaggattcactggaaatgcagcttcatatccgttttcagtatataattcatggatgggtaattttgttggatatgagccgtttgcaacagcatatttatatgtatgcatgctttattcggcattgccttattgtggattttttgtaagagacaacaagaatcagtacattttacagtattacagccgtatgtctaaaaataaagtgcatgcagctaaatttataacaacatttgttatcggaggaatgcttgtatttttacctgtcttaattaatctgattgcaacaatgatgtttattccagcattacctcctattgagaatggtttatttattggaacaggaaaatcaataatgtctaatctcttttgcgaccacacaatgatttatgtgcttatatatatagtgcagttctttatatatggcggtgctttttcagttgtttcacttgcggtttcatttacatttaataatgtttttctcgttattgtgtcgccatttgttgcttattatggtgtcggagttatttcaacacttagtaagaattatcttggcataacaagttttaatcctatggtatatcttagtccttcatatctccttcctaacaaggcacttataggattcatactggaaccgttaattattattggagtgagtatgttgatattctttaggaaaggagcagaaaatgaagcgttgtaaagtaattgcattaataatatgcagtgttgttgtagttatatgtacagcaatgattataagaattaatattcaatttcctaaagcggaagataagagttatacgattgataatcctgcagatattgacggagttattgttaaaccgcttagctatcaggtatgtacaatagatgaatattcacaaatttcatcagaatattctaaggttaaagatgaaaagaaagataaatgcagaatagttgtgcttacaatatcaatagagaatacaactgaagaagtggcagactatactccaagttttatattcgtatcagaggaactgaatgcatttaatggtgcaataccgattggttcaggatcaagacattgtacattgctgcctcatgagacaaaagagatgaaactacgggcttatatcggggcatcacagttagatcaaaataatcttgataagctcgattcttcgacaataacattagtatattctttttatccatatagaaggaagcttgttttcagcagatagaaacggggattattatgaaaaagcttttaaaaaatccattgttttatgtgatgtattttattccgcaattaataatgacacatgctgtttcaacatttaataagactttttccaatggccagacatgttttgcagattattatttacatttttatgattgggattcttatgattttttgtgcatgtatgaagtgatttatgtatcattttttatggttatgttggttagacgtgagttgatgtcaaacagagttgtattatatgattcgacaacaaaattatgggtaaatactataaaaagcagtgcattgtttactataatttttccggtaatgaattgtgtcattattggaattgtggctgctatgaaaaatgctgtttttacatgtaactggagtaagactggaagtatggctgcggctatcataccttattatgaattacatgaaataaacacatttattgtggctggattatcggtatttcttgatattataagactgcaggttacattatttattgtatgtattgcaagttggcttgtacgaaagacaatagtagtatttctggttgtatacattaatattattattgtgaatatacagccgcttcttgcttattgcgatatgaatgtaaagagtatctataattacatgattgtgtcgaagatggggacatatctaaagggaatatctgtatttgataatgtagtactgcctgttattatctgggcggtgtgtgtagcagtaagttatctgacattcaggttttatagaaaggacatgcttaagaactaatgagatgttttattaatgtatttaaggcagacctgaaaaggttttggaatattgcatggaaattatacatagcatttgcagtgtattctttaatgcaggctttaatattctttgctaatatgaacaaatcaatcaataaggggaggatagcagcagtgtcgttaggcgacagccttatggatttctttaaaggagctaaagagttctatcccgaaagaaatctggcgatggatattccggtgcttgagatatttgtccttttatttttgctttttattgttgcgtattatattaattcggacaggagtgcgttaagcaggagcataatgattgcctcgcgttcaccagtgtactggtgggtcagtaaatatattatcgcagtattagctgcacttgtatatatggttctgataattgtaacatttgcagtcagtggctttgcagttctaggaaataagttcagtctgaggatgcattttaccgccagagagaacataaaactcatacttggaagtgaagatataagctgccagaccaatgttgttttacttatggttctgtgtacgcttagcttaattactgcatgtattataattctgctggtttcatatgtgtttaactctatatttggatttattattaatctattgttattcatattcagcatatgttatatgaagtggtttggcttctataattatatgatgatgtacagaatcccgcatgtttatgacagatggtatcttggagcgttattaatgctggggatagatgtggggattatggctactggaattatatattcaagaaaaagagattttctgtaggaggagtaagtatgtatattgaattgaaaaatgtatctaagaaaattaaaggtattgatattcttgatgatgtcagcattagaatggaatctggaaagatatatggtttcaggggaaagaatggaagtggtaagacaatgcttatgcgtgcaatagcaggtcttatcaaggttacaggaacagttgatattgatgggaagatattaggaaaagatgaaatgtttccgccaagcataggtattcttatagagaatccgtcatttataagtaattatactgggtttgagaatctaaagactcttgcttcaatcagagaaagaattgatgataacaagataaggcagacacttacggaggttgggcttgaaccggatgataagagaacattcaagaaatattcactcggtatgaaacaaagactaggtatagcggctgcgataatggaagatccagatattattattcttgatgaaccgattaatgcgcttgatgattcaggaactgagcaggtaaggcagattcttatgaaacataagcaaagaggggcactcattattattgcatgtcatgatgctgatgaactggaattcttatcagacgagattattgagatagcagaaggaaaaatacaaccaaagaaagataagaaaagcaataagcagtaaaaaataagttcctgcagtttccagtgtttctggcacaatggaaactgcaggaactttttgttaatcttcgtcgttaatatctttctgtgcaacagcagcagctataactgatatgataaccacagcagcaataatagcaactgcaacacctataattggtccgatgaataacataaaactcataacattacacctcttcgaacatatttattatatccattatatatcggttttataatatgtacaagcaattaagcgtcttttttagattctttttcttctttagcaaggtttttgttagcagttgaaagcataagcttgattctgtttaactggttaacttcggaagcaccaggatcataatctacagcaattatgttagcttcaggatatgctgcacgaagctctttgataactccctttcctacaatgtggttaggcagacatgcaaatggctgacagcatacgatattgcctacaccatgatggataagctcaatcatttcaccggtaagaagccagccttcaccagtctgattgccaagtgatacgaagtctttagcgtaattggctgtctcactaatcttagatggagcatcgaatctcttgctttctgcaagtgccttggttccagcctttctgaaggtttcaagtatctttataagtgtacttgaaagaatagcacccttcttaggtgtctttaataattcatgcttatatgttgaattctgcatacagtagagaaggaatcccataaggtcaggcataacagcctcagcaccttctgcctcaagtaattcaataatgtggttgttagcagcaggcatgaacttaacaagaatctctccaacaacaccaactctaggcttcttgatatccttaagcgggatattatcaaagtccttaacaatagcacggagattcttattgaattctttcatatgaaccttatttttagtaagctgttcaatgcagaccttcttccatttttcatgaagtgcattaactgaaccaggaactgcctcgtaaggtcttgtgcggtacacaacattcatgaagatatcaccatattcaacagccatcatagctttcttaagcattggtatgtcatagctgaagcccggattagattcaagtccctgtgcactcagtgagattacaggaacatctggaataccagcctttatgagtgctcttctgatgaatccgatatagttggaagcacggcatccaccacctgtctgtgacataatcacagcagttcttgaaaggtcgtatttgcctgaaagaagggcgttcataatctgtccgactaccataagtgaagggtagcatgcgtcgttattaacatatttaagacctacatctactgatgacttgttgtcattctcaaggacttcaatattgtagccacatgaattaagggcaggacctaatatgtcaaaatgtattggtgacatctgaggacagagaattgtgtaattctttctcatatcttcagtaaactgtactctgtggtaggcagatgactgaatctttctctggtagttcttctgttcacgtactcttaaagcagcgattagtgaacgtactctgattcttgcagcaccaaggttattaacctcatcaatcttaagtactgtatatatctttccagacttagtaagtatatcgttgacagcgtcagtagtaacggcatcaagaccgcatccaaatgaattgagctggataaggtcgagattatctacagtctttacatagttagcagcagcgtaaagtcttgaatggtacatccactggtcaagaatgataagaggtctttctactgttcctaaatgtgcaacactgtcctctgtaagtactgcaagtccgtatgaattaataagttcaggaataccgtggtttacttcagggtcaacatggtaaggacggccggcaagtacaataccgcgctttccggttttgttaaggtaagcgattacttcttcacctttatttctgacatcctgtctgcaagccatcatttcatcccatccggctttgacagcagacttaatctctgcggcaggaatgtatgatgagaattcctcaacaagtcttttggatatcttctcctcactttcaaatgacatgaaaggatttctgaaatctatattctctgttttaagttcttctacattattcttaatgttctcggcataagaagtaacgatagggcagttataatggttgttagtgccttcatattcgttatgctcataaggtacacatggatagaagataaatttaactccctgcttaataagccacatgatatgaccatgtgcaagctttgcaggataacactctgactcagatggaattgattcaatacctaattcgtaaagcttgtggcttgactgaggtgagagtacaactctgtatccgagctttgtgaaaaatgtataccagaacggatagttctcatacatgttaagaactcttggaatacctacagtgcctcttacagccttttcttcagagagaggctcatagtcaaagagtctgtggaacttataatcgaaaaggttaggaagcttttccttgttcttctctttaccaagtccacgctcacatctgttacctgtgataaactgtctgccgccagagaatttattgattgtaaggtgacagctgttagtacatcccttacatcttgtaagctttgtttcatatgtaagagagttaatcttatctatagaaagcatggatgattctgatataccgtcatatctttctcttgctataagagcagcaccaaaagcccccattataccagcgatatcaggtctgattgcctgaacgcctgtaatcttctcaaaacttctaagaactgcgtcgttgtagaatgtaccaccctgaacaacgatatgcttacctaaatcatcagggtcagaaatcttgataaccttgtataaagcatttttaataacagaataagcaagtccggcagagatatctgcaacttcagcaccttccttctgagcctgcttaaccttggaattcatgaatactgtacaacgtgttcccaaatcaatagggtggttagcaaataaagcagccttggcaaagtcctgaactgtgaagttgagggattttgcaaatgtttctatgaatgaaccacatcctgatgaacatgcttcgttaagctggactgaatctacagtctggttcttaatcttgatacatttcatatcctgtccaccgatatcgatgatacagtctacatccgggtcaaagaaagcagcagcgtaaaaatgtgacactgtctcaacttctccctcatctagcataagagccgacttgataagtgcttcgccataacctgttgagcatgactgcacaatcttagcttctggtggaagcagtgtatatatctctttaatagctttaattgttgtagcaagtggtgaaccgttattgcttgagtagaatgagtaaagaagattaccgtcttcatcaactaaagcaaccttggttgttgttgaacccgcatcgattccgagatagcagttgcccttgtaagatgcgatatcagcagtcttaacatgatgagagctgtgacgctttgtgaattcatcatatgcaaactggttctcaaaaagaggttccatacgttcaacctcgaactcaagcttaatctttcctttaagtcttgcgataatgtcttctacaggaacacatacattttcactgtaattcattgctgaaccaacagcagcaaataagtgtgaatggtcaggagcaatgatttcatccggacctaagcttaatgtacggataaatgcctgtcttaactctgataagaaatgaagtggtccgcctaagaatgcaacattaccacggattggtttaccacatgcaagaccactgattgtctggtttacaacagcctggaatatagatgcagaaaggtcttccttagttgcaccttcattgataagaggctggatatctgttttggcaaatacaccacatcttgcggcaatagggtatattgacttatagttcttggcatattcattaagtcccattgcgtctgtctgtaacagagttgccatctggtcaatgaaagaacctgtaccgccggcacatattccgttcattctctggtcaataccgttagtaaagtagataatcttagcatcctcaccaccaagctcgattgcaacatcacactgtggagcataatcctgaagggcagtagacacggctactacctcctgtgtgaatggtacttctaaatgcttggcaagagtaagtccgcctgaacctgtgataacaggatatacttcaaactcgccaagctcagccactgccttttcaagaagtgactggagagtttcctggatattcgcaaaatgcctttcataatcagaaaataaaatattattattatcatctaaaacagcgatttttacagttgttgatccaatatcaatacctaatttgaatttgttcataacctaatacagctgcagctgtcctccttaatataaatatacaaaagttacccattacatagtgactttggcgaaaaaacgcagaatatgtcattttctatgcaactcatgcattatagagtaaaatggaataaatttcaatattaataggaaataataaaatagctttaattatttattgtagatatttttattaaaatttaagaacttaagagtaagtttaattgacatcatattgttttgtttattataatttcttgtatatgattatgaattattagtctgtaacatgtgtaagactgaaaggaacattttatgaactggtttgctaaatttgagaaaaaattctctaagtatgcgattaagaatcttatgttttatatcattgtcctttatgcaataggatttgtgatgaatacattcttcaatggattatatgacgcatatttttcgcttgattttgctatgattttcaaaggacaggtatggagactctttacatttatcttacaacctccttctaacagcataatatttgtggtgtttgtgctgtatttctactatctgattggttcggtacttgaaagaatatggggctcgttcagatttaatgtatacttcttcacaggagttatccttaatatacttgcatcacttattatctatcttatatggggattaagctttaagttaagcactaactatattaaccttgcactgtttatggcatttgctatggagcagccggatatggaggttttattattcttcattatcccaatcaaaattaaatggatggcaatacttgatgctgtaatattcggaattactatagtattcggatatcttgtgccatttcttccaagaaatgtatggtacagcctgtatgcagcaggtttccttgcaccatcagcaattatgtgttatgccaacgcaacggcggcgcttgtgtcaatgctgaatttcataatattcttcttcctgtacaagaaaggccctgcaaagagcagtacacagagaaacttcgacaaggcaatgagaacagcaaagaaagcacagcagaatgccagaaaagactattggcagcagaatagtggcaacactcagggcaatggtggcacacaatatggcacatatggttctgcgtcatcagataacagaacacagcaaagtcagacacaacacgcaaagcgcggtgtgccgaagcacagatgtgcagtatgcggaaggacagaacttgacgacgaaaacctcacattcagattctgttcaaaatgcgccggcaactacgaatactgttcagaccacttatatactcacatccatgtaactggtgataaacagtaaccagccggggtagaagtgtaagcaaagagaaacagggatggtgtcagaattgaattttctgagttgtgtgggagttaaagccaggttttgctaagcgcggttcaaaaaatcacgttcaagcgtagcgcgttgattttttgaacaaaaaagcgaagcaaaaactggcttttactgccactaaacgaagaaatctgaaatactgacaccatccctgtttctctttgcgtatccttctacccctaaaaagcttgttaaataaaaaacttagttgatttgacacgcaaatatgttattatattgtaggtatgtgtttgaaaagattttaattattttggaggaaacaatgaaaaagactaagattatttgcacaatgggtcctaatactaacgacagaaaccttattaaggatcttgcgttagcaggaatggatattgcaagatttaatttttctcatggtgaccatgaggagcaggcaggaagatttgccttaattaaaagtgtaagagaagaacttaatatccctattgcaactcttcttgatactaagggacctgagatcagaacaggtgctgttaaggatgacaagaaggttacacttgttgagggacagaaatatacattaacaacaagacaggtgccagcagatgataagattaatatggtaacttatgcaggtcttccagaagatgttactacaggtaatattattcttatcgatgatggtcttatcgagcttaaggttgataaggttgaaggtacagagattgaatgtacagtaattaatggtggtgagcttggttctaagaagggtgttaatgttcctaacgtaagcatcagacttccaggcatcacagagaaagataaggaagatatcatctttggtgttgagcagggatttgattttatcgcagcttcatttgtaagaaatgcagcatgtatcgaggaaattaagcaccttctctgggagcatggttcagatatcccagttattgctaagattgagaatgccgaaggtattgctaatatagatgatatcatcagagttgctgatggtatcatggtagcacgtggagatatgggtgttgagattcctgctgaggaagttccacacgttcagaaggaaatcatcaagaagtgtaatgctaagtataaaccagttatcacagctacacagatgcttgattctatgattagaaatccaagacctacaagagctgaggttactgatgttgctaacgctatctacgacggaacagatgttgttatgcttagtggtgagactgctaatggaaagtacccattagaggctgttaagatgatggttaagattgcagaaagaacagagcaggagattaagggacattcagtagaatattctaatcttcacagcaagagaagcatttcaagcgctgtatgtaatgctgcagttcagacagcagataaccttggagctaaggctattatctgtcctacaatttcaggatttacagcaagacttacatctaagttaaagccagaagctgagattatcggatgctctccatacgataatgttcttagaaagatgcagatatactggggcgttagacctcttaagacagcaacagaatcttctacagataagattattgagcatgcattagtagtttctgaacatgctggtttcgtagaagaaggagatacagtaattgtttctgctggtatcgctacatcttctgatccttcatctaagagaggacttactaacacaatgagagtagttacaatctagtacatttgatacatttatttcggaatgaggcttgattttaatattctattatgttataagtaatacacaattaatattacaaagcgttgatggaaacaagtaggttattactgaacttacagaaagcagccggttgatgagaggcgcaagggtaaggataactgaatacattccggagcggcgaactgaaagcatatgcaagtaggggcagccggagtagcacacgttatagtgcataagtccatgctggtggacttaatgaggtggcagatgcgagtctgtcatgaataaaggtggtaacacgtaagttcaggctttcgtccttttaaagaagggcggaagccttttttgtaagcaatgagccatgcaagacagaatgtgcttgcacagattctgtcttatatggcgaatgcagataatgagctgcgagcgcaagcagcaataaaaaagaaaagagaggaaacaaaaatgacactttatgacgaattagttgcaagaggtcttattgcacaggtaacagatgaagcacttatcaaagaccttattaacaatggaaaggctacattctacattggatttgatccaacagcagacagtcttcatgtaggacactttatggcactctgccttatgaagagactccagatggcaggaaataagccaatcgcacttattggcggtggaacagctatgattggtgatccatcaggacgtacagatatgagaaaaatgcttacaccagagcagattcagcacaatgttgactgcttcaagaagcagatggcaagattcattgatttctcagatgacaaggcattacttgttaataatgctgactggcttcttaatcttaactatgtagaacttttaagagaggttggagcatgtttctcagttaataacatgttaagagctgaatgctacaagcagagaatggaaaagggattaagcttccttgagtttaactacatgattatgcagtcatacgatttctatatgttataccagaaatacggctgtaatttacagtttggtggtaatgaccagtggagcaacatgttaggtggaacagagcttatcagaagaaagcttgataaggatgcttcagctatgacaatcacacttcttcttaactcagagggtaagaagatgggtaagacagcttcaggtgctgtatggcttgatccggataagacaagtccttacgatttctatcagtactggagaaatgttgatgatgcagatgttcttaaatgcatccgtatgctcacattccttccacttgaagagattgataagatggatagctgggaaggtgctcagcttaacaaggctaaggagattcttgcttatgagcttacaaagcttgttcatggtgaggaagaagctaagaaagcagaagctacagcaaaggcaatctttactggtggggatgcagctaacatgcctacagcaaagcttgaagcagacagctttacagatgatgaaattgatgcaattaatcttgtgtttggagcaggacttgcaacaactaagtcagaggccagaagaactatccagcagggtggtgtttctgtagatggagaaaaggtagcagatatagcagctaagttccctaagagtatgttcgaaggagacggagtagttgttaagaagggtaagaaatctttcgttaaagtatctgttaattaattgtttccctgaaaaggaaggattatgaaaaaagatgagattacaagggtgaggcttttaagcctcgccgttcttatggctctgagtctgtttattttacttgttcttgtaggaaataatgaatttggacatattattagtaaaatgaataataattcacttaatatttctgaaaatcagaattcagtatacaacctgtattactatacgggatttaatgttatatatcagttatttttctctttaacggtactctttacggcagtatcacttacaggaattcttttaagaataggcaacacgggtataattgcttctgttgctgctatatttaatatgatgactggaatattgcttttaatggcaagaatattggaatcgtcatcatcaatgcatgcatggatagattctttctatattgatggtgtggtaaaaggacagattgagacagcacaactgatggataaaatacctgtgttgtatatattgttggtgattttgggaatacttgagctgatgatggtgaaaagctccggtatcagacgcataaaaatgttttctaaaaataaacagactaacgcagtggtttttcttatgcctgctcttgttatatatgtgtgggaaggctttataagaagaaatatattgtcagaaattataaaaaatggtgattcccaaagaatgacagttaatgaatatcttaccggatattatattggtaataaaatattctttaactggtcatggatgataatgcttttactagcaaccattatttgtataattataaaatcaggtattatcaagggattaagcggcagggcaggaatgttggcaggtatcggtattcctgcacttgtaacaataatgccatctgtaatatatgcatttaacccgcctgcactgtttggatatattacgctggatatatcgttatgtgatatgactgataacgcattttacatgtatctcgtaactttctgcgtgtgcatgacggctgcatacatactgatatatcttgtgataagcgggcttctggatatgagaaagctggcaggtatatttgttataaatgttgttacaagtgtaattcttatgattattgtttcgggcaaatcttcacttgcaatccagtatatgccgtggatagtggcagactgtgcatcagttatactggcgtttatatgtgtggctgttaagcctgttaataataaaatagctgagttatgcggtgcccacaaaaaagtctgactttttggggcaccgcatgattaaattctgattcagccattattttataactgtttaatatctttaatgtcggtgtctgcaaccattgagtagttggtgtaatacacaacgaatcccggtttggcaccggcaggctttttaacttctttctttaatacataatcgacttcaactttttcctgctcacggcctttagagtaataggcggcaaggcttgctgcttcttcaaatgtcctgtcaggaacttcttttccatctgttttaagaagtacatgagaacctggcatctgcttggcatgaaaccaccagtcattgctgttgcctgtcttgaaagtaagttcgtcattctgcatgttattctttccaacatatatgtcaaatccatcacctgatacaaaatgcatcggcttgttggctgtgattttgtgctttcctttaacagtccttttaatatatccagtttcaataagctcttccttaatgttagcaagatcagcctctgttactgaaatttcaattgcattgataatagattcaaggtaacttatttcttcagtaatctcttgaataagacggattccggcttcataggttcttttaagcttgttatatcttgcaaaatatttgttagcattctcaattggtgtgagagtgttatcaagagtaatcttgattgtagtattatcgtaataattaagtgcttcatattccttagaacctgcaggaatactgtaagcgtaggttgtaagaagttcgccgtagatacggtatttgtcttttttctcagtgtcctttatctgcttttcctgaatgtcaagtttcttgtatgctctttcaagatgtgttgttacaattcttcttatatcaacagacttctggtggattcgtgttgcaatctctttctgtctgtaataatcgataatcagtctgcttatcgaatcatattctgtgtggttgtcatacatagaaagcttcacagcggcaaattctgcaggcacaccgttgtcggttaccatatcggggtggtagataccatttcttacatcggacataagtgcgtcaaatacgttgtataatgcatctttcataggcttatcaaggcagttggcagggtgtccgccatcaactccggcacggtatgcaagctcttctgctatacatgtgcttattcctgtatagcttgaaagcagtgccttgacaacaggtacaggctttgtaaatactgtttcgtcaaaatgctttctgtcagcttcaagcggattaatcttgtcagaagtattaggaatgaaataaggtcttccaggtaaaacttccctgactgagcttgtctgtgctgatatatgcttgatactgtctaatatagtattattgtcgtcacataatattatattgctgtgcttgcccatgaattctgcgattatgtgctttctgcacaggtcaccgagttcgtttaaatgttctgcctcaatatcaattacacgttcaaattttggttgtgttatagatattattcttccgttgttcaaatgttttctaagaagcatgcagaaattcggtgcagtagcaggggatggcttgttatcgtctgtaagatatgcaagaggaagcgatgcatttgcagataaaacaagtctgtactgaccagattgtgtctttattgtaagcattatttcatcggcttcaggctgtgctattttgtaaagtcttccgccgttaattgtgttgtttaattcattaacaatactggatattgtaattccatcgaatgccataatgtctcctttagttaataatattcattcttattgcattatattaacatacttattgctgtaagtcttgttatctttcacaaaaattggtatactttcctaggcattatatgcgaatggaaggatagaaacaatgattaaaagtatgacaggctttggccggagtgaaatagttaaaggtaacagaaagatttcagttgagattaagtcagttaatcacagatatcttgaggcaggtatcaagatgcctaagaagcttaatgtgttcgagagcagaatgagagacttgcttaagaagtatgcagcaagaggtaagattgatatatttattaattatgaggatgattcagaaaatcaggttaatcttaagtttaaccagaatatagctgatgaatatatgactatatttaataatatgtccgaaaaatacaatcttaaaaatgatatgacagtaggaggtcttgccagatttccagaggtcatcacgatggatgaggtgcaggaagatgaagaggagctgtggctttttatagaagaagccatgaaggcagccctggagcagtttgttaatacaagaatccttgaaggagagaatcttaagaaagaccttttaggaaagttagaccacatggaggagcttgttgcatttgttgaaaagagaagtcctgagattatgaaggaatatcgcagcaagttagagagtaaggttaaagagcttcttggtgatactactatagatgagagcagaattgcaacagaggttattatatacgcagataagatatgtgttgacgaagaaactgtaagattaagaagccatatcgagcatgcaagaaaatgtcttaacgaggacggcggcattggaagaaagatggatttcattgcacaggagatgaacagagaggctaacacaactctatctaaggctaatgacattgagatatctaatgcagctattgacttaaagactgagattgagaaggtaagagagcagattcagaacattgagtaggctttcaatatatttttaatgggttttgattaaatttacttgattgtttcgggcttgttaggtataataacttgtgcactttatgtgcagaatgaggtaattatatgagcaaaggactattattagttatttcaggattttctggtgcaggaaaaggaactgttatgaagcgacttttagagcttcatgatgagtattcactttctatatcagctacaacaagaaagccaagagaaggcgaagctgatggaagagaatatttctttaagactgtagaagaattcgagaagatgattgctgaagatgctttaatagagcatgcacagtatgttggcaattattacggaacacctaaggcatatgttgaagaacagcttgataagggcaacaatgttattcttgagattgagatacagggtgccatgaatatcaagagaatgttcccagatgcagtgcttatgtttataacaccaccgtcagcagcagaacttgaaaagagactccgtggcagaggaacagaagacgaggcgacaatcaaagcccgtctttcaagagcagcagaggaagcagaaggtgttgaggattatgattacatagttatcaacgatgaagtcgatttatgtgtcggccgtattcatgatattgtgttatctgaaaagatgaaagctaagtataatcttggactgattaataatattaaagaagaattaaaggtttattcgaaaggagaataatataatgatacatccatcgtatactgaattaatggctgtaattaacagtgaggttgaagagggcgagcagcctttagtacagagcagatattcaattgttaaggcaactgctaacagagctaaggaaatcatcgatgcaagaagcgttgaggagaagattgccaaggcaagaattgaagcaagcaacaaggaaaaagagaaagaaaaggacaaggataaggttgaggagaagagaatttctaaggaagatgagagaaagcttcaggttggaactcctcttgtaagatgttcagagaaagacaagccattatcaatcgcagttaaagaattctacgaaggtaaggttaagattcttggaagtacagacgagaatacttcattataattaacaaagactgatgttaagggcaactgcttgtatgggcggttgcccttttgtgcgagtagtgatgagaatacaagcgggaatcacacaatcatgcttgcatgtattgtgtgattatcgcttgcattcgaggagcaccgcgacaacgacagaacgaagttctggagtatgagctacgagaaaaaatgaggagtttgaaattttatgacgaatagatatgatgagaaagaaagacggattcactgtgcattttcagaaaaatgcggtggctgtgattatgccgggatgaaatatgacaatgaacttgcagttaagcagaagtacattgaagaactttttggcgaatatgtaaaagttgatgatattgtaggaatgtacagaccgatacattaccgcaataaagttcatgcagttgtgggacttgatgattcaaggaatgttatagcaggaacttacgaggaaaacagccacagaatagttgacacttcagattgtatgattgaagattcgcagtgtacagacattattaaggatattaaaggccttatagcttcatttaaatatcagccatatgacgaggattcaggaaaggggctgattcgccacattcttttaagaaaaggattttctacaaaggagattatgcttgttattgtaacagcaggagttgcatttccatcaaagaataattttctgaaggtattatgtgagaagcatcctgaaatcactacgattgtgcagaatattaacgacagacatacaagcatggtgcttggaaagagaaatattgttcttaagggaaaaggttatattgaggatgtgttgtgtggctgcaggttcagaataagcccgacatcattctatcagattaaccaccagcagactgaaaagctgtataaaaaggcaatccagcttgctgatatatcaaaaaatgacactgtaattgatgcatattgcggaattggtactattggaatagcagcatccaggaaagctggcaaagttataggagttgagcttaattcagaagctgtatcagatgctaagataaatgcttcaattaacaatataaagaatgtcacatttgttaatgctgatgcaggagatttccttgttgagtatgcgaaaaatgcaaaggcagatgttgttatcatggatccgccaagaagcggaagcacaccggaatttcttaattctcttcttaagattaagccagacaggattgtgtacatttcatgcggacctgatacacaggcaagggatataaaggtgctggttaagggtggatataaggttacggcatgtcagccatttgatttgttcccgcatacggagcatgtggaaacggtagttgcactacatcggaccgatatgtaaaaatccttgagtttaggcactttgagaggttttttaggtttgaccagcgtgaccgaaaaacatataaaaaagcaatttccgacggagtaaatgtgtcggttgtattggatagtgtgtgtggaaacacatcaaagtcaaaataatatcatcatcattcaactaaataaaagtagcgtgagagaccgttcattttcaagaaaattgaaagtgagcggtctttctttggttaaaggagttaggtttcgtgagtaacgattatatgcgttgatgaaaggagcgattgtatggagacgattaagaatgtatctatcagtgaattgtatagttttaggaatcacccgtttaaggtggagaccaatatggaattatgcgagctgatgagaagtattgaaaaggaaggtgtgcttgtgccacttctggtgaggacgaatccttatggagatggatatgaggtcatatcgggacatcgaagaaaggaagcagctctatgggctggggaaactgaggttcctgttgtcataagagagcttgatgatgaccaggcagttgtggcgatggtggattcgaatttgcatcgggagaatttaaagcccagtgagaaagcatttgcctatcgaatgaaactggaggcaatgaagcatcagggaaaaaaggtattggcagatgatataactttggctcaagttgaaccgaggtctgccaaaaaggacacgagggatgttttttatggtgctatgcgaagtaacgagttgcttgcaaagcaggcaggggagagcgtggctcagattaaaagatatatccgccttaccaatcttattcctaagattttgaatatggtggacgaaggaaagattgcttttacagtggctgtggagctttcatatctgaaggaagaggagcagtacgagcttcatgccattatggatttggagcagtgtaccccatctttatctcaagcttgccgcttgaaggtaatgagccaacacggaactttggatatggatgcgatttgtatggttttggaagaagaaaagcccaatcagcgggagcagataaagcttcgtgcagatgtattggcaaagtatttcccagaggattatacacctaaacagaagacggatttaatcgaacagcttctgaaggagtggtatgagaagcaggaatacagcaagcaggaaagccttggcagcagtcgtggtagagcaagataatggaagggaggtagtagcgatgagcagagaattatcaacttatgaagcaatgggtggtacttatacagaggtggatggagtgttttatccgaatattgtggtttcggaggaagcagatgtgtggattggaaaatatggtctgttatgggttgattatatgaaatccaatcatgcagaaaggtacaggcaccatattcgtatgggaaccttgagtgccagagcttttgagctaaatgaagaggcttatgaaatgctggaaggaatcgtgaatcagtatctggcaaagcataagccacagaattcagcttctacagtggaaatgtggaagcttcgggaacaggcaaaacaaatggcggaagaggtcgtgcttagcgacattgtacgccagtatcattagaatttggaggattttagtatgagagagattagagaatacaatatgaacggaactattattttgggcgtagataatggttatggcaatgtgaaaaccgcccacagagtatttcctacgggaattataaagtgtgacagtgaaccggtgctgagtaaggagtatatcgaatatgatggtgcttattatataattggtgaaggtcacaagggctttgttgcagacaagcaggaggatgatgatacttatattctgactcttgcagcgattgcaaaggagcttgaggcaagaggatttacagaggctagaattcatctggcggtgggacttcctttgaagtgggtacaggcacagagaaacagctttaaacagtatttgaccagagaaagatatgtttccctgaaatacagaaaggtaaactatcttatcgaaattgtggattgcacagtcatgccatagggctatgcggctgttgcagagaatttgaaggatttcaagggaatgaacctgctggtggatattggaaacggtaccatgaatgtgatgtatctgaatagcggcagacccatagaaagtaagtcgtggacggaaaaacttggtgtaaatcagtgttttatccgtattcagaatcgaataatggataggaccggaacaaaattaccggatgaaattatcaatgatttcttaagatatggcgatgcggatgtaagtgagtcatatttatcagcgatgaagcaggttgctgaacagtatgtacaggaattgtttcagaagcttcgggattatgagtataacgaagatttgatgaagctgtatgttatgggtggcggtgcaagaatggtgttgatgtttggaaagtacaatacggataggacaacctttaatcatgatatttgtgcaaatgctaaggggtacgaatacttttgttatatgatgcttcgtcagaagaatcgaaagtaggtggttagatggctgtaaagaatcataatttccgtttcaatgaggaaaaagaagcggaaagaaaagcatggcaaattcttcactcagaagaagtgaaggaggacttctgctctcagaatgaatttgttatagctgccatcaatgactactatgcaaggcatcttgcgctcaaaggagatccctatctggaatcgagggagaaggaggatgcatttgtaaaaggaattattgaggcagtagagcaaaaggtacttgataatctgccggggttggcgggcatgtatatgatgcaacagcagtctcttttatccgtgttgggattacaggggatggtgcctgtacaacaacaggtgccaatgccgcagatggtagcaggaatgaagatgtcagggcaggtatcagcatccgtacaagagtcggatcaaaggcaagaggctatggttggcggagatggatgtggaaaaagagattacactgaggaggatgagaaaaagtacaagatagaacctgatattaacgagttccttgatttcagtttttgtggtgaatgatagcagatggctacaaagcttttgtaaataaaagcgttgtagcatcaattgtgaaagaatatgtagccataattgcggtaggaataagtggtgccggaaacggcaaattgtgtagccagttaaatacagttattagcttagatgaagccatgtatcttttcgaaggtatgtggctttttctgtatttgctaaagacagattttttatccagccctcggcgtttgagagcgaaatacacccatcgcacaaaacttcgttttgtactctgtgtatttcgcgattgcatcgagctattacgccgtatacggcgatgggttcgtaaacggatgcctatgcatccactcacattaagcattagaagggagatgattaggatgccaagaaattcatttgtgcagatgaataagctgaccaatgtgtcaggcagaattacttatatatcaagtaaggcaaagcaggagtatttgtatgctacttatactacggtttcagagcggagcttttggagagagctggcaaaatgtaaccaggaaagttttcggcagagtgggacagagggaaagtgtattgaggcaagaaaactgattatagcgttgcctgagtcctttatatattatgagccggaatatttgcttaggcgatttacagaccattttaagcagaattataaggtggagtgtatctcagcacttcatcataacaagcggaagaccaattaccatattcatctgatatttgcagagcgtcagcttctggataaaccaatcgaaaagattgctaccagaaatatgttttatgacgaaaggggtaagcaccggcgtaccaagaaggaaatcttggatgaagcaggaaacatccctaaaaagtgcaaggttatcaggaagggggaagtgtatgagaaaaatctttttaccaagaaaaacgagctatttaaggctgacggattcttagatgaggtgaagcgtttatatacggatctgattaatgtctgtgccataaaggaagaggacaaacttcaggtgtttgacaggaatgggatgtatcttgctaccaagaagattggtaaaaacaatcctaaggcagcagagatagaagctgacaatatggagcgtgtcagatggaatcaggcagtagacagagcattgatatcggaggtttcaaaagaggatattttagatgtgaagcgtgaaaagatatcgaaagaggttaagcgttctattgaattatatgggaataatccctcttatctggttgggattattagacttgcaataaaagcattggaactgcttgtatccaaggtattacttgcggcagttaaagtggctgaaaagattgtggatgtggttcatgagaaagttgtagagaaagaggttctagtgttggtggaagagccagagcaggcggttgagattctggaaaaggtacagcttccaaagaagccggaagaaccattattgctgtctaagtatccagtgattatggaactggatgcagaactgaaacgtaggaataaagaaatctttgctattgagcaggagcgaggaaatctggagattgagctggctgaatgtacaggagtatttaagaaaaagcagaggacggaattgcaggagagaattttggttttggataaaaaggtggagaagatgaaaacagaactttcaaaggcacttcgggatgctggatattcaaatactgcggaattctttacagagctttttgcggtgcgtgaggaaaagcgaaagtatgaggaggcttgtaaggtatggcaggaagagtgtgttagggcgaagattagtattgctcgagaggcattctgtaatgagaaaacagcaaggagaagtgaaaagagacatcgttaaatgcgggtggtgctatcacataagttgatatcaccttcttttgctatatcatatgaaactagaatatattatgtacgttcttttggttaaaatgtgatgaaagataacaggtaatgtggtacaatatatttgagagataataaatagttatctattaatttcagaatggataagcgtgattttctcatttagaataaactttgaaatggatattatacctatgaaaatagaacttttagataaaatatttaaagaaaatgtatttacatatagaacttgtaaaattagatattcttatgcgtttgagaattgtttaaaagataaacttttattgttaaaaaaggaatataatgtctatacaatcgatgaactatttgctggatcaaaggataactctgtaagtagaaataagttgaaggagtggggagttggtcttgtaaagaaccttctaggattaatcccagcctatggtgctgttcttacaattattttttcgataacagatacgattagctttttgaaagtatctgatttggaaaaacttcgagaatgtttgcaattaaaagaaaagtctcataagaaatacagaaaaattaaaaatattctaatgataaaaaactgctcatatttgaatgcagaagatactaaaaaagtgcaatttattaaggaactaattgaaaagaagtatataataaacactcttcttattatttgtgaaccattagattttccttctaatttggcagtaaataaagaggcagtgtatacaattgctttagacaataatttgttaaatgacatttgtggatttagtgttgaagacaattatttaaaactgataaatgttttagggatagaatatgcagaatacatcagggatttagataactctactacaataaataacgatttattagtacagagatttgtaaatgatatgcttaaaaagggtggatacgatgaaagtgaaaaattattagattttctaaaattatgcagccttctctttgacgttttcagttatgaggatattgaaaatgtatctggtattaaagaaatatgtagtgaagttgaactggaaaagagcatgaattcaaacctcattgaaagccgcatgccaaacgaatatagattttttatggaatttttgcggaaatactatcaagagcatgcacaattttatggcagcgaggttaaaaggcaaattttagattacctaaaagaaaagtatcctaataaatatactgatttggcattagccagcattttaacaagtaataatgacgccgaaaaaatttcattatgcttaaaatcgatttattatgataagaatacaaccgctttatataaaatagaccaaattatagaatatttatcgaaaagttcatatataacattagcaaatatttcgaaattaaatggcatttatgattctttagattattcacatacagatacaaagcagttatgcatgcaaagttttatgggactatcaaccttagactttttatctccggaagataaattaatgtgtttgggtagtatagctaaggtttcatatgaactaatgtctcaagattttttaaagaaaattgatgaattatacagaaaattgctacgtgacattcgaataagcaccacatataaaagttatacgttatttattcttgattatcttgtcttttccacatgtatagaagatagttttgagacggctcaagttgtacaacgacttgttgaatatttaaaaaaaacatcgctgccattggagaatgagattaaattttcacgtttgggaaatgctcttttttacaatgactatagtgaagggctgaaattaactaagcgagcatacagtttaagtgaaggatatcccattgaacagaaatattcagcaattaattatagttgtagtctgggaatgtgtggcgaatatgaagaagcctgcaaaattctaaaacatgagtttgataacacattctataagaaaaatgctgtttctatatcggcaactaataactacataattatctcttatcttaataactctaaagacgttaaatggctcatagataagatatctgctttaaatgaaatgataaacggttatgtgtttagtgaccagcaaattataaataataacttactggctgcctatattatggaaaatgaagtaactaatcattctaaaatcattgaaatcagtaataatatacattcaaacgaaaaggatatatatcatcttttttttatgcatcataatatgatgatatatcacttcttggttggtgatttggatgcatttaaacgtgagcgcgatttgtgtgttgttccgggactgctagccccatatagcgatttttttgtttccaaagcgaactttctacaagaaaatatagagcgcaagtggaatattaaacagctccaacaacaattgaatggctggggagaatgctattctgaaaagaagtatgtactttataaatatcctattttatttggtttcatcgaaaggtggtttgaatagtttagccttagcgagtccaataaacaataaaaattgataaacggcactttcattgtcaaaacatttcctaaaaatatagttagtagaactatgaaatgagatagtaggatttgctccaatatcagttatatacggagtattgtttttgattctaaagtcaatcctgcatatagtctcaaatcctaatgctttagcaacatttttgctacaacttattaggtcggcagaaagttctcccgtatattctttaaatgagtaatcatccattttaacagtatcataatcaaggtatccagatggactagaattcaaaatttctacacagcctgggcagtaatatttatgttcataaaataatagtggaacttctatttctggtccatcaatatactcctgaatacaaaaacgtaaatgttttttttgataattagtaagaccatttaaaatatttgtagtattttctttcgaaatatcaatcttttcgacaccaatgcttgctgattcatcattcggcttaagtatatatgttccgctttcgattttttctagagtttgctccaaattagtagtttcgtttatgtacactgtaaaaggaatattactacttacataaggatctattaatgtatacatcaattctttatcgccccctaaagtagaagcatagaaattagagccaatattgtttaatttgcagtaatcacagagaagtggaactaggcttcttcttcctatcccagctatattttgagccatgctatatacaaaaatatattggtgctttttttt
